(19) United States
(12) Patent Application Publication
(10) Pub. No.: US 2020/0299709 A1
(43) Pub. Date: Sep. 24, 2020

(54) PHYTASE PRODUCTION AND METHODS OF USING THE SAME

(71) Applicant: AGRIVIDA, INC., Woburn, MA (US)

(72) Inventors: R. Michael RAAB, Arlington, MA (US); Oleg BOUGRI, Winchester, MA (US); Philip A. LESSARD, Framingham, MA (US); Christopher BONIN, South Windsor, CT (US); Michael B. LANAHAN, Cary, NC (US)

(73) Assignee: AGRIVIDA, INC., Woburn, MA (US)

(21) Appl. No.: 16/344,559

(22) PCT Filed: Nov. 3, 2017
(86) PCT No.: PCT/US2017/059903

§ 371 Date: Apr. 24, 2019

Related U.S. Application Data
(60) Provisional application No. 62/419,136, filed on Nov. 8, 2016.

(51) Int. Cl. C12N 15/82; A23K 10/37; A23K 20/142; A23K 20/174; A23K 20/189; A23K 20/22; A23K 20/26; A23K 20/28; A23K 50/10; A23K 50/75

(52) U.S. Cl. CPC C12N 15/8243; A23K 10/37; A23K 20/142; A23K 20/174; A23K 20/189; A23K 20/30; A23K 20/26; A23K 20/28; A23K 50/10; A23K 50/75; A23K 20/22

(57) ABSTRACT

Methods and compositions are described for producing a phytase in transgenic maize plants and then incorporating parts of the transgenic maize plants in animal feed. The feed phytase enzyme displays activity across a broad pH range, and tolerance to temperatures that are often encountered during the process of preparing animal feeds. Methods of producing an animal feed that incorporate the transgenic maize plants, parts thereof or plant derived phytases, as well as methods of promoting the release of inorganic phosphate from a phytic acid in an animal, producing an animal meat, or reducing the ratio of intake of an animal feed per weight of the animal meat by feeding an animal with the animal feed incorporating transgenic maize plants are provided.

### CROSS REFERENCE TO RELATED APPLICATIONS

[0001] This application claims the benefit of U.S. Provisional Application No. 62/419,136, which was filed on Nov. 8, 2016 and is incorporated herein by reference as if fully set forth.

[0002] The sequence listing electronically filed with this application titled “Sequence Listing,” which was created on Oct. 26, 2017 and had a size of 828,602 bytes is incorporated by reference herein as if fully set forth. The Substitute Sequence listing titled “Substitute Sequence Listing” filed Jun. 9, 2020, having a file size of 829,067 bytes, and created Jun. 9, 2020 is incorporated herein by reference as if fully set forth.

### FIELD

[0003] The disclosure relates to transgenic maize plants engineered to express phytases, the nucleic acids encoding the same, as well as methods of making and identifying the transgenic maize plants, and producing and utilizing animal feed. The disclosure also relates to feed additives that include phytases. The disclosure relates to genes encoding phytase forms that have been modified to improve performance as components of feed for monogastric and ruminant animals. The disclosure relates to intragenic expression of plant phytases in maize plants.

### BACKGROUND

[0004] Phytases are enzymes that promote the release of inorganic phosphate from phytic acid (inositol hexakisphosphate). Phytic acid, or its deprotonated form, phytate, is common in many animal feed components such as grains and legumes, and can represent a significant portion of the total phosphate content in these feeds. However, many livestock cannot efficiently digest phytic acid and are therefore unable to absorb the phosphate. As a result, other forms of phosphate, such as rock phosphate or calcium phosphate, must be added to animal diets to provide this critical nutrient. Furthermore, phytic acid acts as an antinutrient in the diet, binding to proteins, intercalating with starch and other carbohydrates, and chelating minerals such as iron, calcium and magnesium, which prevents their absorption. Undigested phytic acid and excess inorganic phosphate can be excreted in the feces, which can act as a significant source of phosphate pollution in agricultural run-off. Inclusion of phytases in animal diets can alleviate the need to add inorganic phosphate, increasing the absorption of phosphate, proteins and minerals by the animal, and decreasing phosphate pollution from agricultural run-offs. Similarly, adding high doses of phytase onto a phosphate adequate diet can increase livestock growth and performance relative to the same diet with lower concentrations of phytase.

### SUMMARY

[0005] In an aspect, the invention relates to a maize plant or part thereof comprising one or more synthetic nucleic acids. The one or more synthetic nucleic acids have a sequence with at least 90%, at least 95% or at least 99% identity to a sequence selected from the group consisting of: SEQ ID NOS: 11, 13, 15, 17, 19, 25, and 27, or a complement thereof, or the one or more synthetic nucleic acids encode a phytase comprising an amino acid sequence with at least 90%, at least 95% or at least 99% identity to a sequence selected from the group consisting of SEQ ID NOS: 12, 14, 16, 18, 20, 26, and 28.

[0006] In an aspect, the invention relates to a maize plant or part thereof comprising one or more synthetic polynucleotides selected from the group consisting of SEQ ID NOS: 42, 43, 125, 154, 156, 157, 158, 159, and 175.

[0007] In an aspect, the invention relates to a progeny of any one the maize plants described herein.

[0008] In an aspect, the invention relates to an animal feedstock comprising any one of the maize plants or parts thereof described herein or the progeny thereof.

[0009] In an aspect, the invention relates to a method of producing an animal feedstock. The method comprises mixing any one of the maize plants or parts thereof described herein, or the progeny thereof with plant material.

[0010] In an aspect, the invention relates to a method of promoting the release of inorganic phosphate from a phytic acid or phytate in an animal. The method comprises feeding an animal with an animal feedstock comprising any one of the maize plant or parts thereof described herein, or the progeny thereof.

[0011] In an aspect, the invention relates to a method of promoting the release of minerals, amino acids, and energy from a high phytase-containing diet in an animal. The method comprises feeding an animal with an animal feedstock comprising any one of the maize plant or parts thereof described herein, or the progeny thereof, and high, adequate, or deficient amounts of dietary phosphate.

[0012] In an aspect, the invention relates to a kit for identifying event PY15, PY53, PY203, PY209, PY1053, or PY1203 in a sample. The kit comprises a first primer and a second primer. The first and the second primers are capable of amplifying a synthetic polynucleotide selected from the group consisting of SEQ ID NOS: 126, 128, 130, 131, 133, 135, 136, and 176-184.

[0013] In an aspect, the invention relates to a kit for identifying event PY15, PY53, PY203, PY209, PY1053, or PY1203 in a sample. The kit comprises a probe capable of hybridizing to a synthetic polynucleotide comprising a sequence of one of SEQ ID NOS: 42, 43, 125, 154, 156, 157, 158, 159, and 175 under conditions of high stringency.

[0014] In an aspect, the invention relates to a method of identifying event PY15, PY53, PY203, PY209, PY1053, or PY1203 in a sample. The method comprises contacting a sample with a first primer and a second primer. The method also comprises amplifying a synthetic polynucleotide comprising a PY15, PY53, PY203, PY209, PY1053, or PY1203 specific region.

[0015] In an aspect, the invention relates to a method of identifying event PY15, PY53, PY203, PY209, PY1053, or PY1203 in a sample. The method comprises contacting a sample with at least one nucleic acid probe that hybridizes to a PY15, PY53, PY20-3, PY209, PY1053, or PY1203 specific region under conditions of high stringency. The method also includes detecting hybridization of the at least one nucleic acid probe to the PY15, PY53, PY203, PY209, PY1053, or PY1203 specific region.

[0016] In an aspect, the invention relates to a method of producing an animal meat. The method comprises feeding an animal with an animal feedstock comprising any one of the maize plants or parts thereof described herein, or any one of the progeny of the maize plants described herein.

[0017] In an aspect, the invention relates to a method of reducing the ratio of intake of an animal feed per weight of the meat in an animal. The method comprises feeding an animal with any one of the animal feedstocks comprising a phytase described herein.

### BRIEF DESCRIPTION OF THE DRAWINGS

[0018] The following detailed description of preferred embodiments of the present invention will be better understood when read in conjunction with the appended drawings. For the purpose of illustrating the invention, there are shown in the drawings particular embodiments. It is understood, however, that the invention is not limited to the precise arrangements and instrumentalities shown. In the drawings:

[0019] FIG. 1 illustrates tandem expression cassettes for Phy02 in the expression vector pAG4281.

[0020] FIG. 2 illustrates the range of Nov9X activity that was observed in the grains of the transgenic plants that had been generated with the expression vectors pAG4270 and pAG4798.

[0021] FIG. 3 illustrates examples of phytase expression levels detected in seed when Phy03 expression is driven by one of three different promoters: Glut1, rice glutelin 1 promoter; Glut4, rice glutelin B4 promoter; Zein, maize gamma zein 27 promoter.

[0022] FIG. 4 illustrates pH optima of phytases.

[0023] FIG. 5 illustrates gastric stability of modified phytases.

[0024] FIG. 6 illustrates gastric stability of commercial phytase.

[0025] FIG. 7 illustrates thermal stability of modified phytases.

[0026] FIG. 8 illustrates body weights of broilers fed on diets containing grain-expressed phytase and a microbially produced commercial control phytase (Commercial Phytase).

[0027] FIGS. 9A-9B illustrate body weight (FIG. 10A) and feed conversion (FIG. 10B) for broilers fed on diets containing different doses of phytase and dietary available phosphorus (aP) through 45-day of age.

[0028] FIG. 10 illustrates body weight gain and feed conversion for broilers fed on diets containing different doses of phytase, different levels of dietary available phosphorus (P) and calcium (Ca), and different levels of amino acids (AA) and metabolizable energy (ME), through 28 day of age.

[0029] FIG. 11 illustrates weight gain and feed conversion for broilers fed on diets containing different doses of phytase, different levels of dietary available phosphorus (P) and calcium (Ca), and different levels of amino acids (AA) and metabolizable energy (ME), through 42 day of age.

[0030] FIG. 12 illustrates breast meat weight and intake/breast meat weight for broilers fed on diets containing different doses of phytase, different levels of dietary available phosphorus (P) and calcium (Ca), and different levels of amino acids (AA) and metabolizable energy (ME), through 42 day of age.

[0031] FIG. 13 illustrates breast meat efficiency (feed intake per breast meat weight) for broilers fed on diets containing different doses of phytase and dietary available phosphorus (aP) and calcium (Ca).

[0032] FIG. 14 illustrates breast meat efficiency for broilers fed on basal diets A, B, and C containing different doses of phytase.

[0033] FIG. 15 illustrates phytase activity that is produced from each of the two independent T-DNA inserts in seed from progeny of PY203.

[0034] FIG. 16 illustrates general multiplex PCR assay design used to determine presence of the T-DNA locus and zygosity.

[0035] FIG. 17 illustrates multiplex standard PCR analysis of selfed segregating PY203 plants.

[0036] FIG. 18 illustrates real-time PCR analysis of selfed segregating PY15 plants.

[0037] FIG. 19 illustrates PY53 standard gel-based PCR assay design and example data.

[0038] FIG. 20 illustrates PY53 real-time PCR assay design and example data.

[0039] FIG. 21 illustrates multiplex standard PCR analysis of selfed segregating PY209.

[0040] FIG. 22 illustrates multiplex standard PCR analysis of selfed segregating PY1053.

[0041] FIG. 23 illustrates multiplex standard PCR analysis of selfed segregating PY1203.

### DETAILED DESCRIPTION OF EMBODIMENTS

[0042] The words “a” and “one,” as used in the claims and in the corresponding portions of the specification, are defined as including one or more of the referenced item unless specifically stated otherwise. This terminology includes the words above specifically mentioned, derivatives thereof, and words of similar import. The phrase “at least one” followed by a list of two or more items, such as “A, B, or C,” means any individual one of A, B or C as well as any combination thereof.

[0043] Certain terminology is used in the following description for convenience only and is not limiting.

[0044] “Synthetic nucleic acid sequence,” “synthetic polynucleotide,” “synthetic oligonucleotide,” “synthetic DNA,” or “synthetic RNA” as used herein refers to a nucleic acid sequence, a polynucleotide, an oligonucleotide, DNA, or RNA that differs from one found in nature by having a different sequence than one found in nature or a chemical modification not found in nature. The definition of synthetic nucleic acid includes but is not limited to a DNA sequence created using biotechnology tools. Such tools include but are not limited to recombinant DNA technology, chemical synthesis, or directed use of nucleases (so called “genome editing” or “gene optimizing” technologies).

[0045] “Synthetic protein,” “synthetic polypeptide,” “synthetic oligopeptide,” or “synthetic peptide” as used herein refers to a protein, polypeptide, oligopeptide or peptide that was made through a synthetic process. The synthetic process includes but is not limited to chemical synthesis or recombinant technology.

[0046] As used herein, “variant” refers to a molecule that retains a biological activity that is the same or substantially similar to that of the original sequence. The variant may be from the same or different species or be a synthetic sequence based on a natural or prior molecule.

[0047] As used herein, “alignment” refers to a plurality of nucleic acid or amino acid sequences aligned lengthwise for visual identification of commonly shared nucleotides or amino acids. The percentage of commonly shared nucleotides or amino acid is related to homology or identity between sequences An alignment may be determined by used to identify conserved domains and relatedness between the sequences. An alignment may be determined by computer programs such as CLUSTAL O (1.2.1) (Sievers et al. (2011) Molecular Systems Biology 7: 539 doi: 10. 1038/msb. 2011.75).

[0048] In an embodiment, a synthetic nucleic acid encoding a phytase is provided. The synthetic nucleic acids may include a sequence with at least 70, 72, 75, 80, 85, 90, 91, 92, 93, 94, 95, 96, 97, 98, 99 or 100% identity to a sequence selected from the group consisting of: SEQ ID NO: 11 [PAPhy_b1], SEQ ID NO: 13 [PAPhy_b2], SEQ ID NO: 15 [Phy-02], SEQ ID NO: 17 [Phy-02opt], SEQ ID NO: 19 [Phy-03], SEQ ID NO: 21 [PhyNov9X], SEQ ID NO: 23 [PhyQB], SEQ ID NO: 25 [ZmPhy1], and SEQ ID NO: 27 [ZmPhy2], or a complement thereof.

[0049] In an embodiment, the synthetic nucleic acid may encode a phytase comprising an amino acid sequence with at least 70, 72, 75, 80, 85, 90, 91, 92, 93, 94, 95, 96, 97, 98, 99 or 100% identity to a reference sequence selected from the group consisting of: SEQ ID NO: 12 [PAPhy_b1], SEQ ID NO: 14 [PAPhy_b2], SEQ ID NO: 16 [Phy-02], SEQ ID NO: 18 [Phy-02opt], SEQ ID NO: 20 [Phy-03], SEQ ID NO: 22 [PhyNov9X], SEQ ID NO: 24 [PhyQB], SEQ ID NO: 26 [ZmPhy1], and SEQ ID NO: 28 [ZmPhy2] is provided. As used herein, “phytase” is an enzyme capable of catalyzing the hydrolysis of phytic acid. The phytase may be modified for improved thermal stability. The thermally stable phytase may have activity when heated to a temperature of 60° C. to 90° C.

[0050] A phytase modified for thermal stability may be produced by standard molecular biological techniques and then screened. The phytase may be subjected to mutation and then screened for thermal stability. Screening systems that can be utilized may include lambda phage, yeast, or other expression systems that allow production of the protein and/or testing of its physical and/or functional characteristics. From a population of modified proteins, candidates may be isolated and may be further analyzed. Further analysis may include DNA sequencing, functional assays, structural assays, enzyme activity assays, monitoring changes in gastric stability or lability, and monitoring changes in thermal stability, or structure in response to elevated temperature conditions.

[0051] The phytase may be modified for gastric lability. A gastric labile phytase may be a phytase that completely degrades in stimulated gastric fluid (SGF) in a time period that is less than 45 minutes. The complete degradation of the phytase may occur in a time period from 45 minutes to 40 minutes, from 40 minutes to 35 minutes, from 35 minutes to 30 minutes, from 30 minutes to 25 minutes, from 25 minutes to 20 minutes, from 20 minutes to 15 minutes, from 15 minutes to 10 minutes, from 10 minutes to 8 minutes, from 8 minutes to 6 minutes, from 6 minutes to 4 minutes, from 4 minutes to 2 minutes, or in less than 2 minutes (end points inclusive) of the SFG treatment. The time period for degradation may be in a range between any two integer value between 0 minutes and 45 minutes. The complete degradation of the phytase in SGF may occur in 10 minutes. The gastric lability of the phytase may be determined by a standardized assay for sensitivity to simulated gastric fluid (Thomas et al., 2004) as described herein in Example 4.

[0052] An embodiment provides a composition comprising, consisting essentially of, or consisting of one or more phytase. The composition may be but is not limited to a transgenic plant including the one or more phytases, an animal feedstock or animal feed additive including the one or more phytases or an enzyme mixture including the one or more phytases. The transgenic plant may be a maize plant, or part of the maize plant. The transgenic plant may be a progeny of any transgenic maize plants described herein. A phytase in the composition may be encoded by any one of the synthetic nucleic acids described herein.

[0053] Determining percent identity of two amino acid sequences or two nucleic acid sequences may include aligning and comparing the amino acid residues or nucleotides at corresponding positions in the two sequences. If all positions in two sequences are occupied by identical amino acid residues or nucleotides then the sequences are said to be 100% identical. Percent identity can be measured by the Smith Waterman algorithm (Smith T F, Waterman M S 1981 “Identification of Common Molecular Subsequences,” Journal of Molecular Biology 147: 195-197, which is incorporated by reference in its entirety as if fully set forth).

[0054] In an embodiment, synthetic nucleic acids, polynucleotides, or oligonucleotides are provided having a portion of the sequence as set forth in any one of the nucleic acids listed herein or the complement thereof. These isolated nucleic acids, polynucleotides, or oligonucleotides are not limited to but may have a length in the range from 10 to full length, 10 to 1590, 10 to 1500, 10 to 1400, 10 to 1300, 10 to 1200, 10 to 1100, 10 to 1000, 10 to 900, 10 to 800, 10 to 600, 10 to 500, 10 to 400, 10 to 300, 10 to 200, 10 to 100, 10 to 90, 10 to 80, 10 to 70, 10 to 60, 10 to 50, 10 to 40, 10 to 35, 10 to 30, 10 to 25, 10 to 20, 10 to 15, or 20 to 30 nucleotides or 10, 15, 20 or 25 nucleotides. A synthetic nucleic acid, polynucleotide, or oligonucleotide having a length within one of the above ranges may have any specific length within the range recited, endpoints inclusive. The recited length of nucleotides may start at any single position within a reference sequence (i.e., any one of the nucleic acids herein) where enough nucleotides follow the single position to accommodate the recited length. The recited length may be full length of a sequence, or the complement thereof.

[0055] An embodiment comprises a synthetic nucleic acid, polynucleotide, or oligonucleotide comprising, consisting essentially of, or consisting of a sequence that has at least 70, 72, 75, 80, 85, 90, 91, 92, 93, 94, 95, 96, 97, 98, 99, or 100% identity along its length to a contiguous portion of a polynucleotide having any one of the sequences set forth herein or the complements thereof. The contiguous portion may be any length up to the entire length of a sequence set forth herein, or the complement thereof.

[0056] In an embodiment, a hybridization probe or primer is 85 to 100%, 90 to 100%, 91 to 100%, 92 to 100%, 93 to 100%, 94 to 100%, 95 to 100%, 96 to 100%, 97 to 100%, 98 to 100%, 99 to 100%, or 100% complementary to a nucleic acid with the same length as the probe or primer and having a sequence chosen from a length of nucleotides corresponding to the probe or primer length within a portion of a sequence as set forth in any one of the nucleic acids listed herein. In an embodiment, a hybridization probe or primer hybridizes along its length to a corresponding length of a nucleic acid having the sequence as set forth in any one of the nucleic acids listed herein. In an embodiment, the hybridization conditions are low stringency. In an embodiment, the hybridization conditions are moderate stringency. In an embodiment, the hybridization conditions are high stringency.

[0057] An embodiment provides a composition comprising, consisting essentially of, or consisting of an individual phytase or a combination of two or more phytases herein. An embodiment provides a composition comprising, consisting essentially of, or consisting of an individual phytase expression cassette or a combination of two or more phytase expression cassettes herein. An embodiment provides a composition comprising, consisting essentially of, or consisting of an individual gastric labile phytase or a combination of phytases in which at least one phytase is gastric labile.

[0058] In an embodiment, a phytase of the composition may be a variant. Variants may include conservative amino acid substitutions: i.e., substitutions with amino acids having similar properties. Conservative substitutions may be a polar for polar amino acid (Glycine (G, Gly), Serine (S, Ser), Threonine (T, Thr), Tyrosine (Y, Tyr), Cysteine (C, Cys), Asparagine (N, Asn) and Glutamine (Q, Gln)); a non-polar for non-polar amino acid (Alanine (A, Ala), Valine (V, Val), Thyptophan (W, Trp), Leucine (L, Leu), Proline (P, Pro), Methionine (M, Met), Phenilalanine (F, Phe)); acidic for acidic amino acid Aspartic acid (D, Asp), Glutamic acid (E, Glu)); basic for basic amino acid (Arginine (R, Arg), Histidine (H, His), Lysine (K, Lys)); charged for charged amino acids (Aspartic acid (D, Asp), Glutamic acid (E, Glu), Histidine (H, His), Lysine (K, Lys) and Arginine (R, Arg)); and a hydrophobic for hydrophobic amino acid (Alanine (A, Ala), Leucine (L, Leu), Isoleucine (I, Ile), Valine (V, Val), Proline (P, Pro), Phenylalanine (F, Phe), Tryptophan (W, Trp) and Methionine (M, Met)). Conservative nucleotide substitutions may be made in a nucleic acid sequence by substituting a codon for an amino acid with a different codon for the same amino acid. Variants may include non-conservative substitutions. A variant may have 40% phytase activity in comparison to the unchanged phytase. A variant may have at least 40%, 45%, 50%, 55%, 60%, 65%, 70%, 75%, 80%, 85%, 90%, 91%, 92%, 93%, 94%, 95%, 96%, 97%, 98%, 99%, or 100% activity, or an integer between any of the two values herein, in comparison to the unchanged phytase. The phytase activity may be determined by the Phytase Assay from Seed described in Example 2 herein.

[0059] In an embodiment, the one or more proteins having less than 100% identity to its corresponding amino acid sequence of SEQ ID NO: 12 [PAPhy_b1], SEQ ID NO: 14 [PAPhy_b2], SEQ ID NO: 16 [Phy-02], SEQ ID NO: 18 [Phy-02opt], SEQ ID NO: 20 [Phy-03], SEQ ID NO: 22 [PhyNov9X], SEQ ID NO: 24 [PhyQB], SEQ ID NO: 26 [ZmPhy1], or SEQ ID NO: 28 [ZmPhy2] is a variant of the referenced poein or amino acid. In an embodiment, an isolated protein, polypeptide, oligopeptide, or peptide having a sequence with at least 70, 75, 80, 85, 90, 91, 92, 93, 94, 95, 96, 97, 98, 99, or 100% identity to a protein having the sequence of any one of SEQ ID NO: 12 [PAPhy_b1], SEQ ID NO: 14 [PAPhy_b2], SEQ ID NO: 16 [Phy-02], SEQ ID NO: 18 [Phy-02opt], SEQ ID NO: 20 [Phy-03], SEQ ID NO: 22 [PhyNov9X], SEQ ID NO: 24 [PhyQB], SEQ ID NO: 26 [ZmPhy1], and SEQ ID NO: 28 [ZmPhy2] along 10 to 50, 10 to 100, 10 to 150, 10 to 300, 10 to 400, 10 to 500, 10 to 600, or 10 to all amino acids of a protein having the sequence of any of one any one of SEQ ID NO: 12 [PAPhy_b1], SEQ ID NO: 14 [PAPhy_b2], SEQ ID NO: 16 [Phy-02], SEQ ID NO: 18 [Phy-02opt], SEQ ID NO: 20 [Phy-03], SEQ ID NO: 22 [PhyNov9X], SEQ ID NO: 24 [PhyQB], SEQ ID NO: 26 [ZmPhy1], and SEQ ID NO: 28 [ZmPhy2] is provided. This list of sequence lengths encompasses every full length protein in SEQ ID NO: 12 [PAPhy_b1], SEQ ID NO: 14 [PAPhy_b2], SEQ ID NO: 16 [Phy-02], SEQ ID NO: 89 [Phy-02opt], SEQ ID NO: 20 [Phy-03], SEQ ID NO: 22 [PhyNov9X], SEQ ID NO: 24 [PhyQB], SEQ ID NO: 26 [ZmPhy1], and SEQ ID NO: 28 [ZmPhy2] and every smaller length within the list, even for proteins that do not include over 530 amino acids. For example, the lengths of 10 to 50, 10 to 100, 10 to 150, 10 to 300, 10 to 400, 10 to 500, and 10 to all amino acids would apply to a sequence with 500 amino acids. A range of amino acid sequence lengths recited herein includes every length of amino sequence within the range, endpoints inclusive. The recited length of amino acids may start at any single position within a reference sequence where enough amino acids follow the single position to accommodate the recited length. The range of sequence lengths can be extended by increments of 10 to 100N amino acids, where N=an integer of ten or greater, for sequences of 1000 amino acids or larger. The fragment of the phytase may be a subsequence of the polypeptides herein that retain at least 40% activity of the phytase. The fragment may have 100, 200, 300, 310, 315, 320, 325, 330, 335, 340, 345, 350, 355, 360, 361, 362, 364, 365, 366, 367, 368, 369, 370, 371, 373, 374, 375, 376, 377, 378, 379, 380, 385, 390, 395, 400, 410, 411, 412, 413, 414, 415, 416, 417, 418, 419, 420, 425, 430, 435, 440, 445, 450, 455, 460 465, 470, 475, 480, 485, 490, 495, 500, 510, 515, 520, 521, 522, 523, 524, or 525 amino acids. The fragments may include 20, 30, 40, 50, 100, 150, 200, 300, 400, 500 or 525 contiguous amino acids. Embodiments also include nucleic acids encoding said amino acid sequences, and antibodies recognizing epitopes on said amino acid sequences.

[0060] A less than full length amino acid sequence may be selected from any portion of one of the sequences of SEQ ID NO: 12 [PAPhy_b1], SEQ ID NO: 14 [PAPhy_b2], SEQ ID NO: 16 [Phy-02], SEQ ID NO: 18 [Phy-02opt], SEQ ID NO: 20 [Phy-03], SEQ ID NO: 22 [PhyNov9X], SEQ ID NO: 24 [PhyQB], SEQ ID NO: 26 [ZmPhy1], and SEQ ID NO: 28 [ZmPhy2] corresponding to the recited length of amino acids. A less than full length amino acid sequence may be selected from a portion of any one of SEQ ID NO: 12 [PAPhy_b1], SEQ ID NO: 14 [PAPhy_b2], SEQ ID NO: 16 [Phy-02], SEQ ID NO: 18 [Phy-02opt], SEQ ID NO: 20 [Phy-03], SEQ ID NO: 22 [PhyNov9X], SEQ ID NO: 24 [PhyQB], SEQ ID NO: 26 [ZmPhy1], and SEQ ID NO: 28 [ZmPhy2]. A less than full length amino acid sequence of SEQ ID NO: 12 may include one or more of the aspartic acid residues located at positions 178 and 205 (D178 and D205), the tyrosine residue located at position 208 (Y208), the asparagine residue located at position 262 (N262), and the histidine residues located at positions 263, 344, and 381 (H263, H344 and H381) of this sequence. A less than full length amino acid sequence of SEQ ID NO: 14 may include one or more of the aspartic acid residues located at positions 173 and 200 (D173 and D200), the tyrosine residue located at position 203 (Y203), the asparagine residue located at position 259 (N259), and the histidine residues located at positions 260, 341, and 378 (H260, H341 and H378) of this sequence. A less than full length amino acid sequence of SEQ ID NO: 26 or 28 may include one or more of the arginine residue at positions 178 and 182 (R178 and R182), and the histidine residue at position 179 (H179) of this sequence. A less than full length amino acid sequence of SEQ ID NO: 16, 20, 22 or 24 may include the RHGxRxP motif located at positions 16-22 of SEQ ID NO: 24, 18-24 of SEQ ID NO: 22, or 17-23 of SEQ ID NO: 16 or 20, wherein x refers to a variable amino acid residue. A less than full length amino acid sequence of SEQ ID NO: 24 may include one or more of the arginine residues at positions 16, 20, 92 and 267 (R16, R20, R92, and R267), the histidine residues at positions 17 and 303 (H17 and H303), the glycine residue at position 18 (G18), the proline residue at position 22 (P22), the threonine residues at positions 23 and 305 (T23 and T305), the lysine residue at position 24 (K24), the aspartic acid residues at positions 88 and 304 (D88 and D304), the serine residues at positions 212 and 215 (S212 and S215), and the methionine residue at position 216 (M21) of this sequence. A less than full length amino acid sequence of SEQ ID NO: 22 may include one or more of the arginine residues at positions 18, 22, 94 and 269 (R18, R22, R94, and R269), the histidine residues at positions 19 and 305 (H19 and H305), the glycine residue at position 20 (G20), the proline residue at position 24 (P24), the threonine residues at positions 25 and 307 (T25 and T307), the lysine residue at position 26 (K26), the aspartic acid residues at positions 90 and 306 (D90 and D306), the serine residues at positions 214 and 217 (S214 and S217), the methionine residue at position 218 (M218), and the glutamine residue at position 253 (Q253) of this sequence. A less than full length amino acid sequence of SEQ ID NOS: 16 or 22 may include one or more of the arginine residues at positions 17, 21, 93 and 268 (R17, R21, R93, and R268), the histidine residues at positions 18 and 304 (H18 and H304), the glycine residue at position 19 (G19), the proline residue at position 23 (P23), the threonine residues at positions 24 and 306 (T24 and T306), the lysine residue at position 25 (K25), the aspartic acid residues at positions 89 and 305 (D89 and D305), the serine residues at positions 213 and 216 (S213 and S216), the methionine residue at position 217 (M217), and the glutamine residue at position 253 (Q253) of this sequence. A less than full length amino acid sequence of a phytase may include cysteins that form disulfide bonds. A less than full length amino acid sequence of SEQ ID NO: 24 may include one or more pairs of the cysteine residues at positions 178 and 188 (C178 and C188); 77 and 108 (C77 and C108); 382 and 392 (C382 and C392); and 133 and 408 (C133 and C408). A less than full length amino acid sequence of SEQ ID NO: 22 may include one or more pairs of the cysteine residues at positions 76 and 205 (C76 and C205); 180 and 190 (C180 and C190); 79 and 110 (C79 and C110); 384 and 394 (C384 and C394); and 135 and 410 (C135 and C410). A less than full length amino acid sequence of SEQ ID NO: 16 may include one or more pairs of the cysteine residues at positions 78 and 109 (C78 and C109); 383 and 393 (C383 and C393); and 134 and 409 (C134 and C409). A less than full length amino acid sequence of SEQ ID NO: 20 may include one or more pairs of the cysteine residues at positions 78 and 109 (C78 and C109); 178 and 188 (C178 and C188); 383 and 393 (C383 and C393); and 134 and 409 (C134 and C409).

[0061] The fragment may include a conserved region of a phytase. The conserved region of the phytase may include amino acid residues of a sequence of SEQ ID NO: 12 [PAPhy_b1], SEQ ID NO: 14 [PAPhy_b2], SEQ ID NO: 16 [Phy-02], SEQ ID NO: 18 [Phy-02opt], SEQ ID NO: 20 [Phy-03], SEQ ID NO: 22 [PhyNov9X], SEQ ID NO: 24 [PhyQB], SEQ ID NO: 26 [ZmPhy1], and SEQ ID NO: 28 [ZmPhy2]. A “conserved region” or “conserved domain” refers to a region in heterologous nucleic acid sequences or amino acid sequences with a high degree of sequence identity between the different sequences. A “conserved domain” of a phytase refers to a domain within an amino acid sequence of a phytase family that has at least 90% identity, at least 95% identity, at least 97% identity, at least 98% identity, or at least 99% identity to a polypeptide of consecutive amino acid residues. A person of ordinary skill in the art recognizes that conserved domains of phytases may be identified as regions of identity to a specific consensus sequence. By using alignment methods known in the art, the conserved domains of phytases may be determined for phytases identified in different organisms. The conserved domains may be identified in microbial phytases or plant phytases. The conserved domains may be identified in E. coli phytases. The conserved domains may be identified in Zea mays phytases. The conserved domain for amino acid sequences of SEQ ID NO: 12 or SEQ ID NO: 14 may comprise consecutive amino acid residues 173 to 383. The conserved domain for an amino acid sequence of SEQ ID NO: 26 or 28 may comprise consecutive amino acid residues 170 to 202. The conserved domain for an amino acid sequence of SEQ ID NO: 16, 20, 22 or 28 may comprise consecutive amino acid residues 16 to 306. The conserved domain may include any fragment of a phytase that is capable of catalyzing the hydrolysis of phytic acid. The conserved domain may be gastric labile.

[0062] In an embodiment, any one or more phytases may be produced in a plant or plant tissue. The one or more phytases may be produced upon introduction into the plant genome of any one more of synthetic nucleic acids described herein. The synthetic nucleic acid may encode a phytase enzyme or fragment thereof. The synthetic nucleic acid may be an expression cassette that directs the plant to express a phytase. The methods of introduction of synthetic nucleic acids into the plants are known in the art. The method may be transformation of the plant with a vector that includes synthetic nucleic acids encoding the one or more phytases. The one or more phytases may be isolated from the plant or plant tissue. The one or more phytases expressed in the transgenic plant herein may have activity at a pH ranging from 4.0 to 8.00. The pH may be 4.0, 5.0, 5.5, 6.0, 7.0, 7.5, or 8.0, or a pH within a range between any two of the foregoing pH values (endpoints inclusive). The one or more phytases expressed in a transgenic plant herein may have activity when exposed to a temperature in the range of 60° C. to 90° C., endpoints inclusive. The temperature may be 60° C., 65° C., 70° C., 75° C., 80° C., 85° C., 90° C., 25° C., to 30° C., 25° C. to 35° C., 25° C. to 40° C., 25° C. to 45° C., 25° C. to 50° C., 25° C. to 55° C., 25° C. to 60° C., 60° C. to 65° C., 60° C. to 70° C., 60° C. to 75° C., 60° C. to 80° C., 60° C. to 85° C., 60° C. to 90° C., or less than 90° C. The one or more phytases may be produced in any transgenic plant.

[0063] In an embodiment, a maize plant or a part thereof including a synthetic nucleic acid encoding any one or more of the phytases described herein is provided. The maize plant or a part thereof may be a transgenic maize plant or a part As used herein, the transgenic maize plant may refer to a whole transgenic maize plant or a part thereof. The part may be but is not limited to one or more of leaves, stems, flowers, buds, petals, ovaries, fruits, or seeds. The part may be callus from a transgenic plant. A transgenic maize plant may be regenerated from parts of a transgenic plant. A transgenic maize plant may be a product of sexual crossing of a first transgenic maize plant and a second transgenic maize plant or a non-transgenic maize plant where the product maize plant retains a synthetic nucleic acid introduced to the first transgenic plant. The transgenic maize plant herein is also referred to as an “event.” An event is characterized by presence of the transgene comprising a synthetic nucleic acid encoding a phytase. The term “event” also refers to the genomic region of the transformed parent comprising the inserted synthetic nucleic acid sequence and the parent genomic sequences flanking the insertion. The term “event” also refers to progeny produced by crossing of the transgenic maize plant and a non-transgenic maize plant of the same genetic background. The term “line” also refers to progeny produced by crossing of the transgenic maize plant and a non-transgenic maize plant with any genetic background. After repeated crosses, the transgene and the flanking sequences of the originally transformed parent may be present in a progeny plant in the same location in the genome or on the same chromosome as in the transformed parent.

[0064] In an embodiment, a method engineering a transgenic maize plant including any one of the phytases described herein is provided. The method may include contacting at least one maize plant cell with a vector comprising a synthetic nucleic acid encoding a phytase. The synthetic nucleic acid encoding a phytase is also referred herein as a transgene. The method may include selecting a maize plant cell that includes the transgene. The method may include regenerating a transgenic maize plant that includes the transgene. The transgenic maize plant may be homozygous for the transgene. The transgenic maize plant may be heterozygous for the transgene. The heterozygous maize plant may be a hemizygous maize plant when at least one allele of the transgene encoding a phytase is missing. A heterozygous maize plant may be phenotypically indistinguishable from the wild type maize plants and may express a phytase. To produce homozygous maize plants expressing a phytase, a heterozygous transgenic maize plant may be self-crossed. Progeny may be obtained from such crosses. The progeny may include homozygous, heterozygous and wild type maize plants. The method may include analyzing the progeny for the presence of the transgene and selecting a progeny plant that includes the transgene.

[0065] In an embodiment, the method may further include crossing a heterozygous transgenic maize plant to another transgenic maize plant heterozygous for the same transgene. The method may include selecting a first progeny maize plant that is homozygous for the transgene. The method may further include crossing the transgenic maize plant to a wild type maize plant of the same genetic background. Progeny may be obtained from such crosses. The progeny may include heterozygous and wild type maize plants. The method may include selecting a first progeny plant that is heterozygous for the transgene. The method may further include selfing the first heterozygous progeny maize plant and selecting a second progeny maize plant that is homozygous for the transgene comprising a synthetic nucleic acid sequence encoding a phytase. The method may include analyzing the progeny for the presence of the transgene and selecting a progeny plant that includes the transgene. The maize plant homozygous for the transgene comprising a synthetic nucleic acid sequence encoding a phytase is also referred to herein as a homozygous event. A method of identifying the homozygous event by PCR is described herein in Example 8.

[0066] A transgenic maize plant herein may be homozygous, hemizygous, or heterozygous for the gene encoding a phytase. A transgenic maize plant may be an intragenic maize plant. As used herein, the term “intragenic plant” refers to a plant expressing a gene coding for a phytase from another plant species, from the crop plant itself, or from a sexually compatible donor plant that can be used in conventional breeding. An intragenic maize plant contains no phytase genes derived from non-plant species. The intragenic phytase gene itself may be a synthetic gene that has been optimized for expression in the host plant, but encodes a phytase enzyme that is derived from another plant species or the same plant species.

[0067] A transgenic maize plant may be a cisgenic maize plant. As used herein, the term “cisgenic plant” refers to a plant expressing a gene coding for a phytase from the same species, from the crop plant itself, or from a sexually compatible donor plant that can be used in conventional breeding.

[0068] A transgenic maize plant, intragenic or cisgenic maize plant may include more than one gene encoding a phytase. If a transgenic, intragenic or cisgenic maize plant includes more than one gene encoding a phytase integrated into the different regions of the plant genome, the undesirable genes may be segregated away during the above-described crosses.

[0069] An embodiment provides a progeny of any one of the transgenic maize plants, intragenic or cisgenic maize plants described herein.

[0070] In an embodiment, a method of increasing phytase activity in a seed is provided. The method may include crossing genetically independent transgenic or intragenic maize plants or events. As used herein, “genetically independent events” refer to transgenic or intragenic maize plants having DNA insertions in different regions of the plant genome. The method may include obtaining a progeny plant having phytase activity of at least 200 FTU/g, 1,000 FTU/g, 5,000 FTU/g, 10,000 FTU/g, 15,000 FTU/g, or more than 20,000 FTU/g.

[0071] In an embodiment, a maize plant or part thereof may comprise one or more synthetic nucleic acids comprising a sequence with at least 70, 72, 75, 80, 85, 90, 91, 92, 93, 94, 95, 96, 97, 98, 99 or 100% identity to a sequence selected from the group consisting of: SEQ ID NOS: 11, 13, 15, 17, 19, 21, 23, 25, and 27, or a complement thereof. The maize plant or part thereof may comprise one or more synthetic nucleic acids encoding a phytase comprising an amino acid sequence with at least 70, 72, 75, 80, 85, 90, 91, 92, 93, 94, 95, 96, 97, 98, 99 or 100% identity to a sequence selected from the group consisting of: SEQ ID NOS: 12, 14, 16, 18, 20, 22, 24, 26, and 28. The maize plant or part thereof may comprise the phytase comprising the amino acid sequence with at least 70, 72, 75, 80, 85, 90, 91, 92, 93, 94, 95, 96, 97, 98, 99 or 100% identity to a sequence of SEQ ID NO: 12. The maize plant or part thereof may comprise the phytase comprising a conserved domain with at least 90, 91, 92, 93, 94, 95, 96, 97, 98, 99, or 100% identity to amino acid residues 173-383 of SEQ ID NO: 12. The maize plant or part thereof may comprise the phytase comprising the amino acid sequence with at least 70, 72, 75, 80, 85, 90, 91, 92, 93, 94, 95, 96, 97, 98, 99 or 100% identity to a sequence of SEQ ID NO: 14. The maize plant or part thereof may comprise the phytase comprising a conserved domain with at least 90, 91, 92, 93, 94, 95, 96, 97, 98, 99, or 100% identity to amino acid residues 173-383 of SEQ ID NO: 14. The maize plant or part thereof may comprise the phytase comprising the amino acid sequence with at least 70, 72, 75, 80, 85, 90, 91, 92, 93, 94, 95, 96, 97, 98, 99 or 100% identity to a sequence of SEQ ID NO: 16. The maize plant or part thereof may comprise the phytase comprising a conserved domain with at least 90, 91, 92, 93, 94, 95, 96, 97, 98, 99, or 100% identity to amino acid residues 16-306 of SEQ ID NO: 16. The maize plant or part thereof may comprise the phytase comprising the amino acid sequence with at least 70, 72, 75, 80, 85, 90, 91, 92, 93, 94, 95, 96, 97, 98, 99 or 100% identity to a sequence of SEQ ID NO: 20. The maize plant or part thereof may comprise the phytase comprising a conserved domain with at least 90, 91, 92, 93, 94, 95, 96, 97, 98, 99, or 100% identity to amino acid residues 16-306 of SEQ ID NO: 20. The maize plant or part thereof may comprise the phytase comprising the amino acid sequence with at least 70, 72, 75, 80, 85, 90, 91, 92, 93, 94, 95, 96, 97, 98, 99 or 100% identity to a sequence of SEQ ID NO: 22. The maize plant or part thereof may comprise the phytase comprising a conserved domain with at least 90, 91, 92, 93, 94, 95, 96, 97, 98, 99, or 100% identity to amino acid residues 16-306 of SEQ ID NO: 22. The maize plant or part thereof may comprise the phytase comprising the amino acid sequence with at least 70, 72, 75, 80, 85, 90, 91, 92, 93, 94, 95, 96, 97, 98, 99 or 100% identity to a sequence of SEQ ID NO: 26. The maize plant or part thereof may comprise the phytase comprising a conserved domain with at least 90, 91, 92, 93, 94, 95, 96, 97, 98, 99, or 100% identity to amino acid residues 170-202 of SEQ ID NO: 26. The maize plant or part thereof may comprise the phytase comprising the amino acid sequence with at least 70, 72, 75, 80, 85, 90, 91, 92, 93, 94, 95, 96, 97, 98, 99 or 100% identity to a sequence of SEQ ID NO: 28. The maize plant or part thereof may comprise the phytase comprising a conserved domain with at least 90, 91, 92, 93, 94, 95, 96, 97, 98, 99, or 100% identity to amino acid residues 16-306 of SEQ ID NO: 28.

[0072] The maize plant or part thereof may comprise one or more synthetic nucleic acid that are included in the expression cassette. The expression cassette may include at least one regulatory element. The regulatory element may be operably connected to the one or more synthetic nucleic acids. In this context, operably linked means that the regulatory element imparts its function on the nucleic acid. The regulatory element may be selected from the group consisting of: a promoter, a signal peptide, a C-terminal extension and a terminator. For example, a regulatory element may be a promoter, and the operably linked promoter would control expression of the nucleic acid.

[0073] The expression of a synthetic nucleic acid encoding a phytase from the expression cassette may be under the control of a promoter which provides for transcription of the nucleic acid in a plant. The promoter may be a constitutive promoter or, tissue specific, or an inducible promoter. A constitutive promoter may provide transcription of the nucleic acid throughout most cells and tissues of the plant and during many stages of development but not necessarily all stages. An inducible promoter may initiate transcription of the nucleic acid sequence only when exposed to a particular chemical or environmental stimulus. A tissue specific promoter may be capable of initiating transcription in a particular plant tissue. Plant tissue may be, but is not limited to, a stem, leaves, trichomes, anthers, cob, seed, endosperm, or embryo. The constitutive promoter may be, but is not limited to the Cauliflower Mosaic Virus (CAMV) 35S promoter, the Cestrum Yellow Leaf Curling Virus promoter (CMP), the actin promoter, the maize ubiquitin promoter, the switchgrass (Panicum) ubiquitin promoter, or the Rubisco small subunit promoter. The tissue specific promoter may be the maize globulin promoter (ZmGlb1), the rice glutelin promoter (prGTL), the rice glutelin B4 (osGluB-4) promoter, the maize gamma zein promoter (ZmZ27), or the maize oleosin promoter (ZmOle). The promoter may include a sequence with at least 70, 72, 75, 80, 85, 90, 91, 92, 93, 94, 95, 96, 97, 98, 99 or 100% identity to a reference sequence selected from the group consisting of: SEQ ID NOS: 2-6. The promoter may provide transcription of a synthetic nucleic acid having a sequence with at least 70, 72, 75, 80, 85, 90, 91, 92, 93, 94, 95, 96, 97, 98, 99, or 100% identity to a reference sequence selected from the group consisting of SEQ ID NOS: 11, 13, 15, 18, 19, 21, 23, 25, and 27 and expression of a phytase that is capable of catalyzing the hydrolysis of phytic acid.

[0074] The signal peptide may include a sequence with at least 70, 72, 75, 80, 85, 90, 91, 92, 93, 94, 95, 96, 97, 98, 99 or 100% identity to a reference sequence selected from the group consisting of: SEQ ID NOS: 7-10 and 31.

[0075] The C-terminal extension may include a sequence with at least 70, 72, 75, 80, 85, 90, 91, 92, 93, 94, 95, 96, 97, 98, 99 or 100% identity to a sequence of SEQ ID NO: 30 or SEQ ID NO: 32.

[0076] The terminator may include a sequence with at least 70, 72, 75, 80, 85, 90, 91, 92, 93, 94, 95, 96, 97, 98, 99 or 100% identity to a reference sequence selected from the group consisting of: SEQ ID NOS: 33-35.

[0077] The maize plant or part thereof may be transformed with a vector comprising a polynucleotide sequence with at least 70, 72, 75, 80, 85, 90, 91, 92, 93, 94, 95, 96, 97, 98, 99 or 100% identity to SEQ ID NO: 36-37, 46-98, 138-149 or 181. The maize plant may be made by Agrobacterium mediated transformation using transformation vectors known in the art and described herein. The maize plant may be made using biolistic transformation using methods known in the art.

[0078] In an embodiment, a maize plant or part thereof may comprise one more synthetic polynucleotides of SEQ ID NO: 42, 43, 125, 154, 156, 157, 158, 159, or 175.

[0079] The maize plant or part thereof may comprise the synthetic polynucleotide of SEQ ID NOS: 42 or 43, or both. The synthetic polynucleotides of SEQ ID NOS: 42 or 43, or both, may produce a diagnostic amplicon for identifying event PY203. As used herein, event PY203 refers to a maize plant produced following transformation with the construct pAG4758. Event PY203 includes one T-DNA inserted into a region of chromosome 8 comprising a sequence of SEQ ID NO: 39, and another T-DNA inserted into region of chromosome 2 comprising a sequence of SEQ ID NO: 40.

[0080] The maize plant or part thereof may comprise a synthetic polynucleotide of SEQ ID NO: 125. The synthetic polynucleotide of SEQ ID NO: 125 may produce a diagnostic amplicon for identifying event PY15. Event PY15 refers to a maize plant produced following transformation with the construct pAG4758. Event PY15 includes three partial T-DNA sequences inserted into a region of chromosome 5 comprising a sequence of SEQ ID NO: 41.

[0081] The maize plant or part thereof may comprise a synthetic polynucleotide of SEQ ID NO: 175. The synthetic polynucleotide of SEQ ID NO: 175 may produce a diagnostic amplicon for identifying event PY53. Event PY53 refers to a maize plant produced following transformation with the construct pAG4281. Event PY53 includes three complete T-DNA sequences and one partial T-DNA sequence inserted into a region of chromosome 6.

[0082] The maize plant or part thereof may comprise a synthetic polynucleotide of SEQ ID NO: 154. The synthetic polynucleotide of SEQ ID NO: 154 may produce a diagnostic amplicon for identifying event PY209. Event PY209 refers to a maize plant produced following transformation with the construct pAG4295. Event PY209 includes a single T-DNA sequence inserted into a region of chromosome 4.

[0083] The maize plant or part thereof may comprise the synthetic polynucleotide of SEQ ID NOS: 156 or 157, or both. The synthetic polynucleotides of SEQ ID NOS: 156 or 157, or both, may produce a diagnostic amplicon for identifying event PY1053. As used herein, event PY1053 refers to a maize plant produced following transformation with the construct pAG4915.

[0084] The maize plant or part thereof may comprise the synthetic polynucleotide of SEQ ID NOS: 158 or 159, or both. The synthetic polynucleotides of SEQ ID NOS: 158 or 159, or both, may produce a diagnostic amplicon for identifying event PY1203. As used herein, event PY1203 refers to a maize plant produced following transformation with the construct pAG4916.

[0085] As used herein, “amplicon” refers to a portion of DNA that is the product of polynucleotide amplification of a target polynucleotide that is part of a nucleic acid template. The amplicon can be formed by using various amplification methods including polymerase chain reaction (PCR). To determine whether a maize plant resulting from a sexual cross contains event PY15, PY53, PY203, PY209, PY1053, or PY1203, DNA extracted from the tissue of the maize plant may be subjected to a polynucleotide amplification method using a DNA primer pair that includes a first primer derived from flanking sequence adjacent to the insertion site of inserted heterologous DNA, or T-DNA, and a second primer derived from the inserted heterologous DNA, or T-DNA, to produce an amplicon that is diagnostic for the presence of event PY15, PY53, PY203, PY209, PY1053, or PY1203 DNA. Alternatively, the second primer may be derived from the flanking sequence.

[0086] In an embodiment, the first primer and the second primer may be derived from flanking sequence on both sides of the inserted DNA so as to produce an amplicon that includes the entire insert polynucleotide of the expression construct as well as the sequence flanking the transgenic insert. The amplicon may be of a length and may have a sequence that is diagnostic for the event. The diagnostic amplicon may include a junction DNA from event PY15, PY53, PY203, PY209, PY1053, or PY1203. The amplicon may range in length from the combined length of the primer pairs plus one nucleotide base pair to any length of amplicon producible by a DNA amplification protocol. A member of a primer pair derived from the flanking sequence may be located a distance from the inserted DNA sequence, this distance can range from one nucleotide base pair up to the limits of the amplification reaction, or about twenty thousand nucleotide base pairs.

[0087] A “diagnostic amplicon” for event PY15, PY53, PY203, PY209, PY1053, or PY1203, may be produced by any method or assay which discriminates between the presence or the absence of event PY15, PY53, PY203, PY209, PY1053, or PY1203 in a biological sample.

[0088] In an embodiment, a kit for identifying event PY15, PY53, PY203, PY209, PY1053, or PY1203 in a sample is provided. As used herein, a sample may be any sample which a skilled person can use to determine the presence of a nucleic acid or nucleic acids specific to event PY15, PY53, PY203, PY209, PY1053, or PY1203. The sample may be any plant material or material comprising or derived from a plant material such as, but not limited to, food or feed products. As used herein, “plant material” refers to material which is obtained or derived from a plant or plant part. The sample may comprise a maize tissue. The sample may be an extract from the sample comprising the plant material or maize tissue. The kit may include a first primer and a second primer. The first primer and a second primer may be capable of annealing to and amplifying the target DNA by the polymerase chain reaction (PCR). The target DNA may be isolated from event PY15, PY53, PY203, PY209, PY1053, or PY1203. The first primer and a second primer may be capable of amplifying a synthetic polynucleotide of SEQ ID NOS: 126, 128, 130, 131, 133, 135, 136, 176, 177, 178, 179 or 180.

[0089] In an embodiment, a kit for identifying event PY15 in a sample is provided. The kit may include a first primer and a second primer. The first primer and a second primer may be capable of annealing to and amplifying the target DNA by the polymerase chain reaction (PCR). The target DNA may be isolated from event PY15. The first primer and a second primer may be capable of amplifying a synthetic polynucleotide of SEQ ID NO: 126. The kit may include a probe capable of hybridizing to a synthetic polynucleotide comprising a sequence of SEQ ID NO: 125 under conditions of high stringency. As used herein, the term “probe” refers to a synthetic polynucleotide complementary to a strand of a target DNA. The target DNA may be isolated from event PY15. The probe may be attached to a reporter molecule. The reporter molecule may be but is not limited to a radioisotope, luminescent agent, or enzyme. The probe may be used for identifying of the DNA originating from event PY15.

[0090] In an embodiment, a kit for identifying event PY203 in a sample is provided. The kit may include a first primer and a second primer. The first primer and a second primer may be capable of annealing to and amplifying the target DNA by the polymerase chain reaction (PCR). The target DNA may be isolated from event PY203. The first primer and a second primer may be capable of amplifying a synthetic polynucleotide selected from SEQ ID NOS: 128, 130, 131, and 133. The kit may include a probe capable of hybridizing to a synthetic polynucleotide comprising a sequence of SEQ ID NO: 42 or 43 under conditions of high stringency. The probe may be used for identifying of the DNA originating from event PY203.

[0091] In an embodiment, a kit for identifying event PY53 in a sample is provided. The kit may include a first primer and a second primer. The first primer and a second primer may be capable of annealing to and amplifying the target DNA by the polymerase chain reaction (PCR). The target DNA may be isolated from event PY53. The first primer and a second primer may be capable of amplifying a synthetic polynucleotide selected from SEQ ID NO: 135 or 136. The kit may include a probe capable of hybridizing to a synthetic polynucleotide comprising a sequence of SEQ ID NO: 175 under conditions of high stringency. The probe may be used for identifying of the DNA originating from event PY53.

[0092] In an embodiment, a kit for identifying event PY209 in a sample is provided. The kit may include a first primer and a second primer. The first primer and a second primer may be capable of annealing to and amplifying the target DNA by the polymerase chain reaction (PCR). The target DNA may be isolated from event PY209. The first primer and a second primer may be capable of amplifying a synthetic polynucleotide selected from SEQ ID NO: 176. The kit may include a probe capable of hybridizing to a synthetic polynucleotide comprising a sequence of SEQ ID NO: 154 under conditions of high stringency. The probe may be used for identifying of the DNA originating from event PY209.

[0093] In an embodiment, a kit for identifying event PY1053 in a sample is provided. The kit may include a first primer and a second primer. The first primer and a second primer may be capable of annealing to and amplifying the target DNA by the polymerase chain reaction (PCR). The target DNA may be isolated from event PY1053. The first primer and a second primer may be capable of amplifying a synthetic polynucleotide selected from SEQ ID NO: 177 and 178. The kit may include a probe capable of hybridizing to a synthetic polynucleotide comprising a sequence of SEQ ID NO: 156 or 157 under conditions of high stringency. The probe may be used for identifying of the DNA originating from event PY1053.

[0094] In an embodiment, a kit for identifying event PY1203 in a sample is provided. The kit may include a first primer and a second primer. The first primer and a second primer may be capable of annealing to and amplifying the target DNA by the polymerase chain reaction (PCR). The target DNA may be isolated from event PY1203. The first primer and a second primer may be capable of amplifying a synthetic polynucleotide selected from SEQ ID NO: 179 and 180. The kit may include a probe capable of hybridizing to a synthetic polynucleotide comprising a sequence of SEQ ID NO: 158 or 159 under conditions of high stringency. The probe may be used for identifying of the DNA originating from event PY1203.

[0095] In an embodiment, synthetic nucleic acids are provided having a sequence as set forth in any one of the nucleic acids listed herein or the complement thereof. In an embodiment, isolated nucleic acids having a sequence that hybridizes to a nucleic acid having the sequence of any nucleic acid listed herein or the complement thereof are provided. In an embodiment, the hybridization conditions are low stringency conditions. In an embodiment, the hybridization conditions are moderate stringency conditions. In an embodiment, the hybridization conditions are high stringency conditions. The hybridization may be along the length of the synthetic nucleic acid. Examples of hybridization protocols and methods for optimization of hybridization protocols are described in the following books: Molecular Cloning, T. Maniatis, E. F. Fritsch, and J. Sambrook, Cold Spring Harbor Laboratory, 1982; and, Current Protocols in Molecular Biology, F. M. Ausubel, R. Brent, R. E. Kingston, D. D. Moore, J. G. Seidman, J. A. Smith, K. Struhl, Volume 1, John Wiley & Sons, 2000 (standard protocol) and Amersham Gene Images AlkPhos Direct Labeling and Detection System (GE Healthcare UK, Ltd), which are incorporated by reference in their entirety as if fully set forth.

[0096] In AlkPhos Direct Labeling and Detection System, moderate conditions may be as follows: membranes loaded with DNA samples are prehybridized for at least 15 minutes at 55° C. in the hybridization buffer (12% (w/v) urea, 0.5M NaCl, 4% (w/v) blocking reagent). The labeled probe is added to the same solution and hybridization is carried overnight at 55° C. The membranes are washed for 10 minutes at 55° C. in the primary wash solution (2M urea, 0.1% (W/v) SDS, 50 mM of 0.5M Na phosphate pH 7.0, 150 mM NaCl, 1 mM of 1.0 M Mg Cl₂ and 0.2% (w/v) of blocking reagent). The washing procedure is repeated. The membranes are placed in a clean container and washed for 5 minutes in a secondary buffer (1M Tris base, and 2M NaCl). The washing in the secondary solution is performed two more time. Chemoluminescence was detected using CDP-STAR® substrate for alkaline phosphatase. Low stringency refers to hybridization conditions at low temperatures, for example, between 37° C. and 60° C. High stringency refers to hybridization conditions at high temperatures, for example, over 68° C.

[0097] In the standard protocol, moderate conditions may be as follows: filters loaded with DNA samples are pretreated for 2-4 hours at 68° C. in a solution containing 6× citrate buffered saline (SSC; Amresco, Inc., Solon, Ohio), 0.5% sodium dodecyl sulfate (SDS; Amresco, Inc., Solon, Ohio), 5×Denhardt's solution (Amresco, Inc., Solon, Ohio), and denatured salmon sperm (Invitrogen Life Technologies, Inc. Carlsbad, Calif.). Hybridization is carried in the same solution with the following modifications: 0.01 M EDTA (Amresco, Inc., Solon, Ohio), 100 μg/ml salmon sperm DNA, and 5-20×10⁶ cpm ³²P-labeled or fluorescently labeled probes. Filters are incubated in hybridization mixture for 16-20 hours and then washed for 15 minutes in a solution containing 2×SSC and 0.1% SDS. The wash solution is replaced for a second wash with a solution containing 0.1×SSC and 0.5% SDS and incubated an additional 2 hours at 20° C. to 29° C. below Tm (melting temperature in ° C.). Tm=81.5+16.61 Log₁₀([Na⁺]/(1.0+0.7[Na⁺]))+0.41(%[G+C])−(500/n)−P−F. [Na+]=Molar concentration of sodium ions. %[G+C]=percent of G+C bases in DNA sequence. N=length of DNA sequence in bases. P=a temperature correction for % mismatched base pairs (˜1° C. per 1% mismatch). F=correction for formamide concentration (=0.63° C. per 1% formamide). Filters are exposed for development in an imager or by autoradiography. Low stringency conditions refers to hybridization conditions at low temperatures, for example, between 37° C. and 60° C., and the second wash with higher [Na⁺] (up to 0.825M) and at a temperature 40° C. to 48° C. below Tm. High stringency refers to hybridization conditions at high temperatures, for example, over 68° C., and the second wash with [Na+]=0.0165 to 0.0330M at a temperature 5° C. to 10° C. below Tm. In an embodiment, synthetic nucleic acids having a sequence that has at least 75, 80, 85, 90, 91, 92, 93, 94, 95, 96, 97, 98, 99 or 100% identity along its length to a contiguous portion of a nucleic acid having any one of the sequences set forth herein or the complements thereof are provided. The contiguous portion may be the entire length of a sequence set forth herein or the complement thereof.

[0098] In an embodiment, a method of identifying event PY15, PY53, PY203, PY209, PY1053, or PY1203 in a sample is provided. The method may include contacting a sample with a first primer and a second primer. The method may include amplifying a synthetic polynucleotide specific to the PY15, PY53, PY203, PY209, PY1053, or PY1203 region.

[0099] In an embodiment, a method of identifying event PY15 in a sample is provided. The method may include contacting a sample with a first primer and a second primer. The first primer may be a sequence of SEQ ID NO: 100. The second primer may be a sequence of SEQ ID NOS: 99. The method may include amplifying a synthetic polynucleotide specific to the PY15 region. The synthetic polynucleotide specific to the PY15 region may be a synthetic polynucleotide of SEQ ID NO: 126. The synthetic polynucleotide may be a portion of the synthetic polynucleotide of SEQ ID NO: 126. The method may include amplifying the synthetic polynucleotide of SEQ ID NO: 126, or a portion thereof.

[0100] In an embodiment, a method of identifying event PY53 in a sample is provided. The method may include contacting a sample with a first primer and a second primer. The first primer may be a sequence selected from the group consisting of SEQ ID NOS: 120 and 121. The second primer may be a sequence of SEQ ID NO: 119. The method may include amplifying a synthetic polynucleotide specific to the PY53 region. The synthetic polynucleotide specific to the PY53 region may be a synthetic polynucleotide of SEQ ID NO: 135 or 136. The synthetic polynucleotide may be a portion of the synthetic polynucleotide of SEQ ID NO: 135 or 136. The method may include amplifying the synthetic polynucleotide of SEQ ID NOS: 135 or 136, or a portion thereof. The first primer may be a sequence of SEQ ID NO: 121 and the second primer may be a sequence of SEQ ID NO: 119, and the method may include amplifying the synthetic polynucleotide with a sequence of SEQ ID NO: 135. The first primer may be a sequence of SEQ ID NO: 120 and the second primer may be a sequence of SEQ ID NO: 119, and the method may include amplifying the synthetic polynucleotide with a sequence of SEQ ID NO: 136.

[0101] In an embodiment, a method of identifying event PY203 in a sample is provided. The method may include contacting a sample with a first primer and a second primer. The first primer may be a sequence selected from the group consisting of SEQ ID NOS: 105, 107 and 110. The second primer may be a sequence selected from the group consisting of SEQ ID NOS: 104, and 109. The method may include amplifying a synthetic polynucleotide specific to the PY203 region. The synthetic polynucleotide specific to the PY203 region may be a synthetic polynucleotide of SEQ ID NO: 128, 130, 131, or 133. The synthetic polynucleotide may be a portion of the synthetic polynucleotide of SEQ ID NO: 128, 130, 131, or 133. The method may include amplifying the synthetic polynucleotide of SEQ ID NOS: 128, 130, 131, or 133, or a portion thereof. The first primer may be a sequence of SEQ ID NO: 105 and the second primer may be a sequence of SEQ ID NO: 104, and the method may include amplifying the synthetic polynucleotide with a sequence of SEQ ID NO: 128. The first primer may be a sequence of SEQ ID NO: 105 and the second primer may be a sequence of SEQ ID NO: 109, and the method may include amplifying the synthetic polynucleotide with a sequence of SEQ ID NO: 130. The first primer may be a sequence of SEQ ID NO: 107 and the second primer may be a sequence of SEQ ID NO: 104, and the method may include amplifying the synthetic polynucleotide with a sequence of SEQ ID NO: 131. The first primer may be a sequence of SEQ ID NO: 110 and the second primer may be a sequence of SEQ ID NO: 109, and the method may include amplifying the synthetic polynucleotide with a sequence of SEQ ID NO: 133.

[0102] In an embodiment, a method of identifying event PY209 in a sample is provided. The method may include contacting a sample with a first primer and a second primer. The first primer may be a sequence of SEQ ID NO: 161. The second primer may be a sequence of SEQ ID NOS: 164. The method may include amplifying a synthetic polynucleotide specific to the PY209 region. The synthetic polynucleotide specific to the PY209 region may be a synthetic polynucleotide of SEQ ID NO: 176. The synthetic polynucleotide may be a portion of the synthetic polynucleotide of SEQ ID NO: 176. The method may include amplifying the synthetic polynucleotide of SEQ ID NO: 176, or a portion thereof.

[0103] In an embodiment, a method of identifying event PY1053 in a sample is provided. The method may include contacting a sample with a first primer and a second primer. The first primer may be a sequence of SEQ ID NO: 161. The second primer may be a sequence of SEQ ID NOS: 173, or 174. The method may include amplifying a synthetic polynucleotide specific to the PY1053 region. The synthetic polynucleotide specific to the PY1053 region may be a synthetic polynucleotide of SEQ ID NO: 177 or 178. The synthetic polynucleotide may be a portion of the synthetic polynucleotide of SEQ ID NO: 177 or 178. The method may include amplifying the synthetic polynucleotide of SEQ ID NO: 177, or 178, or a portion thereof. The first primer may be a sequence of SEQ ID NO: 161 and the second primer may be a sequence of SEQ ID NO: 173, and the method may include amplifying the synthetic polynucleotide with a sequence of SEQ ID NO: 177. The first primer may be a sequence of SEQ ID NO: 161 and the second primer may be a sequence of SEQ ID NO: 174, and the method may include amplifying the synthetic polynucleotide with a sequence of SEQ ID NO: 178.

[0104] In an embodiment, a method of identifying event PY1203 in a sample is provided. The method may include contacting a sample with a first primer and a second primer. The first primer may be a sequence of SEQ ID NO: 172. The second primer may be a sequence of SEQ ID NO: 170 or 171. The method may include amplifying a synthetic polynucleotide specific to the PY1203 region. The synthetic polynucleotide specific to the PY1203 region may be a synthetic polynucleotide of SEQ ID NO: 179 or 180. The synthetic polynucleotide may be a portion of the synthetic polynucleotide of SEQ ID NO: 179 or 180. The method may include amplifying the synthetic polynucleotide of SEQ ID NO: 179, or 180, or a portion thereof. The first primer may be a sequence of SEQ ID NO: 172 and the second primer may be a sequence of SEQ ID NO: 171, and the method may include amplifying the synthetic polynucleotide with a sequence of SEQ ID NO: 179. The first primer may be a sequence of SEQ ID NO: 172 and the second primer may be a sequence of SEQ ID NO: 170, and the method may include amplifying the synthetic polynucleotide with a sequence of SEQ ID NO: 180.

[0105] In an embodiment, a method of identifying event PY15 is provided. The method may include contacting a sample with at least one nucleic acid probe that hybridizes to a PY15 specific region under conditions of high stringency. The PY15 specific region may be a region including a sequence of SEQ ID NO: 126 or 149. The method may include detecting hybridization of the at least one nucleic acid probe to the PY15 specific region.

[0106] In an embodiment, a method of identifying event PY53 is provided. The method may include contacting a sample with at least one nucleic acid probe that hybridizes to a PY53 specific region under conditions of high stringency. The PY53 specific region may be a region including a sequence of SEQ ID NO: 83, 135 or 136. The method may include detecting hybridization of the at least one nucleic acid probe to the PY53 specific region.

[0107] In an embodiment, a method of identifying event PY203 is provided. The method may include contacting a sample with at least one nucleic acid probe that hybridizes to a PY203 specific region under conditions of high stringency. The PY203 specific region may be a region including a sequence of SEQ ID NO: 128, 130, 131, 133 or 149. The method may include

[0108] detecting hybridization of the at least one nucleic acid probe to the PY203 specific region.

[0109] In an embodiment, a method of identifying event PY209 is provided. The method may include contacting a sample with at least one nucleic acid probe that hybridizes to a PY209 specific region under conditions of high stringency. The PY209 specific region may be a region including a sequence of SEQ ID NO: 176, 181, or 182. The method may include detecting hybridization of the at least one nucleic acid probe to the PY209 specific region.

[0110] In an embodiment, a method of identifying event PY1053 is provided. The method may include contacting a sample with at least one nucleic acid probe that hybridizes to a PY1053 specific region under conditions of high stringency. The PY1053 specific region may be a region including a sequence of SEQ ID NO: 60, 177 or 178, or 183. The method may include

[0111] detecting hybridization of the at least one nucleic acid probe to the PY1053 specific region.

[0112] In an embodiment, a method of identifying event PY21203 is provided. The method may include contacting a sample with at least one nucleic acid probe that hybridizes to a PY1203 specific region under conditions of high stringency. The PY1203 specific region may be a region including a sequence of SEQ ID NO: 64, 179, 180, or 184. The method may include

[0113] detecting hybridization of the at least one nucleic acid probe to the PY1203 specific region.

[0114] In an embodiment, an animal feedstock comprising any one or more of the maize plants described herein, parts of the maize plants, or the progeny thereof is provided. The term “animal feedstock” refers to any food, feed, feed composition, preparation, additive, supplement, or mixture suitable and intended for intake by animals for their nourishment and growth. The phytases included in the maize plants and in the animal feedstock may be active in the gastrointestinal or rumen environment of animals. The phytases included in the maize plants and in the animal feedstock may be gastric labile. The animal may be a monogastric animal. The animal may be a ruminant animal. The monogastric animal may be but is not limited to a chicken, a turkey, a duck, a swine, a fish, a cat, or a dog. The ruminant animal may be but is not limited to cattle, a cow, a sheep, a horse, or a goat. The phytases may be active after preparation of the animal feed. The temperature which feeds are exposed to during ensiling may be within range of 20° C. to 70° C. The ensiling temperature may be a temperature in the range from 20° C. to 30° C., from 30° C. to 40° C., from 40° C. to 50° C., from 50° C. to 60° C., or from 60° C. to 70° C. The temperature may be any temperature within the range recited, endpoints inclusive. The temperature which feeds are exposed to during pelleting may be within a range of 70° C. to 130° C. The temperature may be a temperature in the range from 70° C. to 75° C., from 75° C. to 80° C., from 80° C. to 85° C., from 85° C. to 90° C., from 90° C. to 95° C., from 95° C. to 100° C., from 100° C. to 105° C., from 105° C. to 110° C., from 110° C. to 115° C., from 115° C. to 120° C., from 120° C. to 125° C., or from 125° C. to 130° C. The temperature may be any temperature within the range recited, endpoints inclusive.

[0115] The animal feedstock may comprise phytases that have improved thermal stability and retain activity after being exposed to high temperatures during feed pelleting. The phytase with improved thermal stability may comprise, consist essentially of, or consist of an amino acid sequence with at least 70, 72, 75, 80, 85, 90, 91, 92, 93, 94, 95, 96, 97, 98, 99, or 100% identity to a reference sequence selected from the group consisting of: SEQ ID NO: 12 [PAPhy_b1], SEQ ID NO: 14 [PAPhy_b2], SEQ ID NO: 16 [Phy-02], SEQ ID NO: 18 [Phy-02opt], SEQ ID NO: 20 [Phy-03], SEQ ID NO: 22 [PhyNov9X], SEQ ID NO: 24 [PhyQB], SEQ ID NO: 26 [ZmPhy1], and SEQ ID NO: 28 [ZmPhy2]. The phytase with improved thermal stability may be any one of the phytases described herein. The phytase with improved thermal stability may be gastric labile. The phytase may be gastric stable.

[0116] In an embodiment, a phytase may be isolated from the maize plant or part thereof prior to being included into the animal feedstock.

[0117] In an embodiment, the animal feedstock may further include a feed supplement. The feed supplement may be any plant material. The plant material may be a non-transgenic plant or a transgenic plant. The plant material may include a mutant plant. The plant material may be a grain that contains starch. The plant material may be a grain that contains fiber. The plant material may be a chemically treated forage. The feed supplement may be a mineral. The mineral may be a trace mineral. The mineral may be a macro mineral. The mineral may be rock phosphate or a phosphate salt. The mineral may be calcium phosphate. The feed supplement may be at least one vitamin. The at least one vitamin may be a fat-soluble vitamin. The feed supplement may be an amino acid. The feed supplement may include one or more exogenous enzymes. The one or more exogenous enzymes may include a hydrolytic enzyme. The hydrolytic enzyme may be an enzyme classified under EC3.4 as hydrolase. The hydrolytic enzymes may be but are not limited to xylanases, mannanases, carbohydrases, proteases, peptidases, glucanases, cellulases, lipases, phospholipases, pectinases, galactosidases, laccases, amylases, hemicellulases, or cellobiohydrolases. The hydrolytic enzymes may be expressed in the transgenic plants or parts thereof included in the feed supplement. The feed supplement may include purified hydrolytic enzymes. The feed supplements may be but are not limited to growth improving additives, coloring agents, flavorings, stabilizers, limestone, stearine, starch, saccharides, fatty acids, or a gum. The coloring agents may be carotenoids. The carotenoids may be but are not limited to cantaxanthin, beta-carotene, astaxanthin, or lutein. The fatty acids may be polyunsaturated fatty acids. The polyunsaturated fatty acids may include but are not limited to arachidonic acid, docosohexaenoic acid (DHA), eicosapentaenoic acid (EPA) or gamma-linoleic acid. The plant material may be a non-transgenic plant or part thereof. The plant material may include at least one component selected from the group consisting of: barley, wheat, rye, oat, corn, rice, triticale, beet, sugar beet, spinach, cabbage, quinoa, corn meal, corn pellets, corn oil, distillers grains, forage, wheat meal, wheat pellets, wheat grain, barley grain, barley pellets, soybean meal, soybean oilcake, lupin meal, rapeseed meal, sorghum grain, sorghum pellets, rapeseed, sunflower seed, and cotton seed.

[0118] The feed supplement may include at least one component selected from the group consisting of: soluble solids, fat and vermiculite, limestone, plain salt, DL-methionine, L-lysine, L-threonine, COBAN®, vitamin premix, dicalcium phosphate, selenium premix, choline chloride, sodium chloride, and mineral premix. The feed supplement may include fish meal, fish oil, bone meal, feather meal and animal fat. The feed supplement may include yeast or yeast extract.

[0119] An embodiment provides a method of producing an animal feedstock. The method may include mixing any one of the maize plants or parts thereof described herein, or the progeny thereof with plant material. The maize plant may be a progeny of the transgenic maize plant comprising one or more synthetic nucleic acids described herein and included in a genetic construct(s) or an expression cassette(s) described herein. The method may comprise making any transgenic maize plant herein. The transgenic maize plant or its progeny may be the maize plant, in which phytase levels may be increased by the method herein. The method may further include pelletizing the mixture. The method may further include adding a feed supplement to the mixture. The feed supplement may include at least one exogenous enzyme. The at least one exogenous enzyme may be a hydrolase selected from the group consisting of: xylanase, mannanase, protease, glucanase, and cellulase. Preparing the animal feedstock may include combining one or more transgenic maize plants herein with any other feed supplement.

[0120] The phytase may be isolated, purified and added to the animal feedstock as a pure phytase. The phytase may be added to the animal feedstock in admixture with other feed supplements. The transgenic plant including the phytase or the purified phytase may be combined with other feed supplements to form premixes.

[0121] An animal feedstock may be produced as mash feed. The animal feedstock may be produced as pellets. The milled feed stuffs may be mixed with the premix that includes any one of the transgenic maize plants or parts thereof that include a phytase. The phytase may be gastric labile. The phytase may be gastric stable. The milled stuffs may include the plant material and the feed supplements described herein. The feed supplements may include one or more exogenous enzymes described herein. Enzymes may be added as liquid or solid formulations. For mash feed, a solid or liquid enzyme formulation may be added before or during the mixing step. For pelleted feed, the enzyme preparation may be added before or after the pelleting step. The phytase may be included in premix. The premix may also include vitamins and trace minerals. Macro minerals may be added separately to animal feedstock.

[0122] In an embodiment, a method of enhancing thermal stability of a phytase is provided. The method may include producing a transgenic plant that comprises one or more synthetic nucleic acid encoding the phytase. The one or more synthetic nucleic acids may include any one the sequences described herein. The one or more synthetic nucleic acids may encode any one of the phytases described herein. The phytase may be thermally stable upon exposure to a temperature in the range of 70° C. to 90° C., endpoints inclusive. The phytase may be thermally stable upon exposure to temperatures in the range of 60° C. to 90° C., endpoints inclusive. The phytase may be thermally stable upon exposure to a temperature in the range from 60° C., 65° C., 70° C., 75° C., 80° C., 85° C., 90° C., 60° C., to 65° C., 60° C. to 70° C., 60° C. to 75° C., 60° C. to 80° C., 60° C. to 85° C., 60° C. to 90° C., or less than 90° C. The thermally stable phytase may be gastric labile. The thermally stable phytase may be gastric stable.

[0123] The synthetic nucleic acids described herein may be provided alone, as part of another nucleic acid, as part of a vector or as part of a transgenic maize plant.

[0124] An embodiment provides a method of promoting the release of inorganic phosphate from a phytic acid or phytate in an animal. The method may include feeding an animal with an animal feedstock that includes any one of the maize plants or parts thereof described herein, or the progeny thereof. The method may further include preparing the animal feedstock according to any one of the methods described herein. The animal feedstock may contain high, adequate, or deficient levels of dietary phosphate. The animal may be a monogastric animal. The animal may be a ruminant animal. For monogastric animals, adequate non-phytate phosphorous levels range from 0.30% (w/w) to 0.50% (w/w) for poultry, and standardized total tract digestible phosphorous levels for swine range between 0.20% (w/w) to 0.50% (w/w), endpoints inclusive. Deficient, or reduced, levels of dietary phosphorous are less than the adequate levels of phosphorous described herein, down to 0%. High levels of dietary phosphorous are greater than the adequate levels of phosphorous described herein, up to 100% phosphorous.

[0125] An embodiment provides a method of promoting the release of inorganic phosphate from a phytic acid or phytate in a plant. The method may include expressing a phytase enzyme at increased levels relative to the non-transgenic, or non-intragenic, or cisgenic, plant of the same species. The phytase may be gastric labile. The phytase may be gastric stable. The method may include expressing a phytase in maize plants or parts thereof described herein, or the progeny thereof. The maize plant expressing phytase may have a decreased physiological or growth requirement for phosphate relative to the non-transgenic, non-intragenic or non-cisgenic plant of the same species.

[0126] In an embodiment, a method of increasing apparent metabolizable energy of a diet is provided. The method may include expressing a phytase in a plant or part thereof described herein. The method may include providing a composition that contains a plant or plant part thereof described herein. The composition may include a gastric labile phytase. The composition may include a gastric stable phytase. The method may include providing a plant or plant part thereof comprising any one of the phytases described herein at a level appropriate to feeding animals. The appropriate levels of phytases may be phytase doses that are greater than or equal to 250 FTU/kg, greater than or equal to 500 FTU/kg, greater than or equal to 1000 FTU/kg, greater than or equal to 1500 FTU/kg, greater than or equal to 2000 FTU/kg, greater than or equal to 3000 FTU/kg, greater than or equal to 4500 FTU/kg, greater than or equal to 6000 FTU/kg, greater than or equal to 30,000 FTU/kg, or greater than or equal to 60,000 FTU/kg. Metabolizable energy (ME) refers to the net energy of a diet or feed that is available to an animal after the utilization of some energy in the processes of digestion and absorption and the loss of some of the material as being undigested or indigestible. Metabolizable energy may be apparent metabolizable energy (AME) measured as the difference between the calories of the feed consumed by an animal and excrements collected after feed consumption. Metabolizable energy may be true metabolizable energy (TME), which is similar to AME except that it also takes into account endogenous energy. Energy contents in a diet or feed ingredients may be determined using one of several methodologies (NRC. 1994. Nutrient Requirements of Poultry. 9th rev. ed. Natl. Acad. Press, Washington, D.C., which is incorporated herein by reference as if fully set forth). Gross energy (GE) is direct measurement using an adiabatic bomb calorimeter, which measures the heat of combustion of a sample within a high oxygen atmosphere. Apparent digestible energy (DE) is GE of a feed or feedstuff minus GE of feces only. Apparent metabolizable energy (AME) is GE of a feed or feedstuff minus GE of feces, urine, and gaseous products from digestion. For poultry, the gaseous release is very low, and typically neglected due to its very small value, and the urine and feces are excreted together and are not collected separately in most cases. True metabolizable energy (TME) accounts for only the GE from excreta that is from the feed or feedstuff origin, by subtracting the endogenous energy loss from non-feed origin (i.e. sloughing of intestinal tract cells), which may measured using an unfed control population. Another energy measurement used for feedstuffs in animals is net energy (NE) which adjusts for heat increment. Since heat increment is dependent on level of productivity, which fluctuates in poultry because of short lifespan, this variable is not frequently used in poultry.

[0127] The TME rooster assay may be used to account for endogenous (non-feed) losses of GE by including a fasted rooster and collecting excreta to correct the GE from the fed (feed/feedstuff) rooster. See Sibbald, 1976, Poultry Science 55: 303-308, which is incorporated herein by reference as if fully set forth. This assay has commonly been used for determining TME of individual feedstuffs rather than complete feed, and requires cecetomized roosters (ceca surgically removed) to always be on hand. The assay involves force-feeding (into the crop) a known quantity of an ingredient (in birds that were previously fasted 24-48 hr) and then collect feces for a 24-48 hour period. The equation used to calculate TME is given as TME={(GE_{f}×FI)−[(GEₑ×EO)⁺−(GEₑ×EO)⁻]}/FI, where Gross Energy (GE) is determined by bomb calorimetry in kcal/kg; FI is feed intake (kg); DO is excreta output fed birds (kg); GEₑ is the Gross Energy of the excreta content; GE_{f} is the Gross Energy of the feed; “⁺” signifies the quantity is from the fed birds energy output; and “⁻” signifies that the quantity is from the fasted birds energy output. The roosters (or turkeys) used in TME assays are adult birds with a fully developed digestive tract. Research has shown that there are differences in ME determinations using roosters (layer breeds), turkeys and broilers when analyzing same feed ingredients (Cozannet et al, 2010 J. Anim, Sci., 88(7):2382-2392, which is incorporated herein by reference as if fully set forth). So determining TME or AME using rooster model may not be equivalent to what is observed in a young broiler, but is one proxy in research and industry.

[0128] For broilers, the AME assay may be used for determining complete feed and some energy supplying feedstuffs, as well as the effect from adding feed ingredients that aid in digestion. There are two common methods for determining ME: 1) doing a total excreta collection and weighing and record feed consumption during the time period (Equation 1 below) or 2) using an indigestible marker in feed (chromic oxide, titanium oxide or acid insoluble ash) and taking a subsample of feces with no weighing required (Equation 2 below). The marker method of AME determination may be used, in which no weighing of feed consumption or total fecal collection and no need to separate feed spilled from feces pan are required. With the marker method, birds are fed the marker for at least two days (but preferably five or more days). Feces are collected over several days (e.g., three days) with daily collection composited into one sample.

[0129] AME using the total collection method (Equation 1) is calculated as follows:

AME=[(GE_{f}×FI)−(GEₑ×EO)]/FI,

where Gross Energy (GE) is measured in bomb calorimetry (kcal/kg); FI is feed intake (kg); DO is excreta output (kg); ₑ refers to excreta content; and _{f} refers to the feed content. AME using the marker method is calculated as AME=[(GEₑ/Mₑ)−(GE_{f}/M_{f})]/(GEₑ/Mₑ), where Gross Energy is GE (kcal/kg); M is the marker (ppm or %); “ₑ”=excreta content; “_{f}”=feed content.

[0130] Another method that may be used to determine AME of feed when investigating feed additives that aid in digestion is ileal digestible energy (IDE). This method uses the AME marker method (described above), but the birds are euthanized and a section of ileum excised and contents removed, dried and analyzed for GE and the marker. The IDE method may be used effectively for testing and comparing feed additives used to improve digestion/absorption of feed energy. The benefit of IDE, is no cages with collection pans are required and can collect during a floor-pen study. With the marker method, birds are fed the marker for at least two days (and preferably five or more days).

[0131] AME using the IDE marker method (Equation 2) is calculated as follows:

AME=GE_{f}−(GE_{d}×M_{f}/M_{d}),

where GE (kcal/kg); M represents the marker; “_{d}” represents the digesta content; and “_{f}” signifies the feed content.

[0132] AME and TME may be corrected for nitrogen retention (AMEn and TMEn). To adjust, the grams of N are multiplied by 8.22 kcal/g (GE of uric acid; primary excretory product of protein tissue oxidized for energy), which also is subtracted off of the GE consumed. See Hill, F. W., and D. L. Anderson, 1958, “Comparison of metabolizable energy and productive energy determinations with growing chicks.” J. Nutr. 64:587-603, which is incorporated herein by reference as if fully set forth. Calculations for total collection of marker method for AMEn are shown in Equation 3 and Equation 4 below, respectively.

[0133] Equation 3: AMEn, total collection:

AMEn={(GE_{f}×FI)−(GEₑ×EO)−[8.22×(N_{f}−Nₑ)]}/FI,

where GE=kcal/kg; FI=feed intake (kg); EO=excreta output (kg); N=nitrogen (g); ₑ=excreta content; _{f}=feed content.

[0134] Equation 4: IDEn, marker method:

AMEn=GE_{f}−(GE_{d}×M_{f}/M_{d})−{8.22×[N_{f}−(N_{d}×M_{f}/M_{d})]},

where GE=kcal/kg; M=marker; N=nitrogen (g/kg) “_{d}”=digesta content; “_{f}”=feed content.

[0135] While the TME method may be used for determining ME of individual ingredients, the AME (IDE) method may be used with broilers to measure ME in individual ingredients or total diet and testing effects improving ME by use of enzymes or other feed additives.

[0136] A diet or feed may include any feed ingredient or mixture of ingredients including water. The diet may be any food, feed, feed composition, diet, preparation, additive, supplement, or mixture included in an animal feedstock described herein. The diets are known in the art and described at least in the following publications: Nutrient Requirements of Poultry, 1994, National Research Council, National Academy Press, Washington, D.C.; Broiler Performance and Nutrition Supplement, Cobb-500™, L-2114-07EN, July, 2015; Broiler Performance and Nutrition Supplement, Cobb-700™, L-21124-13EN, Dec. 21, 2012; Broiler Performance and Nutrition Supplement, CobbAvian™, L-2144-04EN, April, 2012; Broiler Performance and Nutrition Supplement, CobbSasso™, L-2154-01, May 7, 2008; Ross 308 Broiler: Nutrition Specifications, 2014 Aviagen, 0814-AVNR-035; Ross Nutrition Supplement 2009, Aviagen; Ross 708 Broiler: Nutrition Specification, 2014 Aviagen, 0814-AVNR-036; Ross PM3 Brioler Nutrition Specification, 2014 Aviagen, 0814-AVNR-037; Arbor Acres Plus Broiler Nutrition Specifications, 2014 Aviagen, 1014-AVNAA-043; Arbor Acres Broiler Nutrition Supplement, 2009 Aviagen; and Association of American Feed Control Officials (AAFCO) 2015 Official Publication, Nutrient Requirements for Poultry, all of which are incorporated herein by reference as if fully set forth.

[0137] In an embodiment, the diet may be a diet for chickens (“broilers”). The diet for broilers may be composed of one or more of the following ingredients: 51.49% (w/w)-61.86% (w/w) corn, 25.45% (w/w)-35.03% (w/w) soybean meal, up to 5.00% (w/w) corn distillers dry grains plus soluble solids, up to 2.00% (w/w) vermiculite, 0.30% (w/w)-1.99% (w/w) dicalcium phosphate, 1.00% (w/w) poultry fat, 0.81% (w/w)-4.01% (w/w) limestone, 0.24% (w/w)-0.50% (w/w) salt (NaCl), 0.13% (w/w)-0.45% (w/w) DL-methionine, 0.20% (w/w) choline chloride 60, 0.20% (w/w) mineral premix, 0.05% (w/w) vitamin premix, 0.13% (w/w)-0.23% (w/w) L-lysine, 0.08% (w/w)-0.14% (w/w) L-threonine, 0.05% (w/w) coban, 0.05% (w/w) selenium premix, 0.15% (w/w) sodium bicarbonate and up to 0.10% (w/w) sand. The concentration of each ingredient within any one of the ranges herein may be any value between any two of the concentration points included in the range. Digestible lysine in the diet may be 1.00% (w/w) to 1.20% (w/w). Digestable lysine may be 1.10% (w/w), 1.11% (w/w). 1.12% (w/w), 1.13%0.47% (w/w), (w/w), 1.14% (w/w), 1.15% (w/w), 1.16% (w/w), 1.17% (w/w), 1.18% (w/w), 1.19% (w/w), or 1.20% (w/w), or any value between any two of the foregoing concentration points. Digestible methionine in the diet may be 0.47% (w/w) to 0.54% (w/w). Digestible methionine may be 0.47% (w/w), 0.48% (w/w), 0.49% (w/w), 0.50% (w/w), 0.51% (w/w), 0.52% (w/w), 0.53% (w/w), or 0.54% (w/w), or any value between any two of the foregoing concentration points. Digestible methionine and cysteine in the diet may be 0.98% (w/w) to 1.10% (w/w). Digestible methionine and cysteine may be 0.98% (w/w), 0.99% (w/w), 1.00% (w/w), or 1.10% (w/w), or any value between any two of the foregoing concentration points. Digestible threonine in the diet may be 0.68% (w/w) to 0.84% (w/w). Digestible threonine may be 0.68% (w/w), 0.69% (w/w), 0.70% (w/w), 0.71% (w/w), 0.72% (w/w), 0.73% (w/w), 0.74% (w/w), 0.75% (w/w), 0.76% (w/w), 0.77% (w/w), 0.78% (w/w), 0.79% (w/w), 0.80% (w/w), 0.81% (w/w), 0.82% (w/w), 0.83% (w/w), or 0.84% (w/w), or any value between any two of the foregoing concentration points. Digestible tryptophan in the diet may be 0.17% (w/w) to 0.22% (w/w). Digestible tryptophan may be 0.17% (w/w), 0.18% (w/w), 0.19% (w/w), 0.20% (w/w), 0.21% (w/w), or 0.22% (w/w), or any value between any two of the foregoing concentration points. Calcium in the diet may be 0.71% (w/w) to 0.96% (w/w). Calcium may be 0.71% (w/w), 0.72% (w/w), 0.73% (w/w), 0.74% (w/w), 0.75% (w/w), 0.76% (w/w), 0.77% (w/w), 0.78% (w/w), 0.79% (w/w), 0.80% (w/w), 0.81% (w/w), 0.82% (w/w), 0.83% (w/w), 0.84% (w/w), 0.85% (w/w), 0.86% (w/w), 0.87% (w/w), 0.88% (w/w), 0.89% (w/w), 0.90% (w/w), 0.91% (w/w), 0.92% (w/w), 0.93% (w/w), 0.94% (w/w), 0.95% (w/w), or 0.96% (w/w), or any value between any two of the foregoing concentration points. Available phosphorus in the diet may be 0.17% (w/w) to 0.46% (w/w). Available phosphorus in may be 0.17% (w/w), 0.18% (w/w), 0.19% (w/w), 0.20% (w/w), 0.21% (w/w), 0.22% (w/w), 0.23% (w/w), 0.24% (w/w), 0.25% (w/w), 0.26% (w/w), 0.27% (w/w), 0.28% (w/w), 0.29% (w/w), 0.30% (w/w), 0.31% (w/w), 0.32% (w/w), 0.33% (w/w), 0.34% (w/w), 0.35% (w/w), 0.36% (w/w), 0.37% (w/w), 0.38% (w/w), 0.39% (w/w), 0.40% (w/w), 0.41% (w/w), 0.42% (w/w), 0.43% (w/w), 0.44% (w/w), 0.45% (w/w), or 0.46% (w/w), or any value between any two of the foregoing concentration points. Sodium in the diet may be 0.17% (w/w) to 0.19% (w/w). Sodium in the diet may be 0.17% (w/w), 0.18% (w/w), or 0.19% (w/w), or any value between any two of the foregoing concentration points.

[0138] In an embodiment, the diet may be the diet for broilers composed of one or more of the following ingredients: 30.00% (w/w)-75.00% (w/w) corn, 5.00% (w/w)-75.00% (w/w) wheat; 5.00% (w/w)-65.00% (w/w) barley; 5.00% (w/w)-30.00% (w/w) sorghum, 5.00% (w/w)-50.00% (w/w) millet, 10.00% (w/w)-45.00% (w/w) soybean meal, 5.00% (w/w)-20.00% (w/w) Canola (Rapeseed) meal, 2.00% (w/w)-15.00% (w/w) corn gluten meal, 5.00% (w/w)-15.00% (w/w) sunflower meal, 5.00% (w/w)-30.00% (w/w) corn distillers dry grains plus soluble solids, 1.00% (w/w)-8.00% (w/w) poultry/porcine/bovine meat and bone meal, 1.00% (w/w)-8.00% (w/w) fish meal, 0.10% (w/w)-2.1% (w/w) dicalcium or monocalcium or defluorinated phosphate, 0.50% (w/w)-6.00% (w/w) soy oil or vegetable oil or animal fat or grease or combination, 0.81% (w/w)-2.00% (w/w) limestone, 0.50% (w/w)-7.00% soy hulls, 0.24% (w/w)-0.50% (w/w) salt (NaCl), 0.13% (w/w)-0.50% (w/w) DL-methionine, 0.01% (w/w)-0.20% (w/w) choline chloride 60, 0.10% (w/w)-0.20% (w/w) mineral premix, 0.05% (w/w)-0.25% (w/w) vitamin premix, 0.05% (w/w)-0.30% (w/w) L-lysine, 0.10% (w/w)-0.30% (w/w) DL-Methionine or methionine analog (MHA), 0.05% (w/w)-0.20% (w/w) L-threonine, 0.05% (w/w) coban, 0.05% (w/w) selenium premix, 0.05% (w/w)-0.15% (w/w) sodium bicarbonate and 250 FTU/kg-60,000 FTU/kg Phytase. The concentration of each ingredient within any one of the ranges herein may be any value between any two of the concentration points included in the range. Metabolizable energy of the diet may be 1225 (kcal/lb)-1491 (kcal/lb). Metabolizable energy may be 1225 (kcal/lb), 1230 (kcal/lb), 1240 (kcal/lb), 1250 (kcal/lb), 1260 (kcal/lb), 1270 (kcal/lb), 1280 (kcal/lb), 1290 (kcal/lb), 1300 (kcal/lb), 1310 (kcal/lb), 1320 (kcal/lb), 1330 (kcal/lb), 1340 (kcal/lb), 1350 (kcal/lb), 1360 (kcal/lb), 1370 (kcal/lb), 1380 (kcal/lb), 1390 (kcal/lb), 1400 (kcal/lb), 1410 (kcal/lb), 1420 (kcal/lb), 1430 (kcal/lb), 1440 (kcal/lb), 1450 (kcal/lb), 1460 (kcal/lb), 1470 (kcal/lb), 1480 (kcal/lb), 1490 (kcal/lb), or 1491 (kcal/lb), or any value between any two of the foregoing concentration points. Crude protein (CP) in the diet may be 15% (w/w) to 25% (w/w). Crude protein (CP) may be 15% (w/w), 16% (w/w), 17% (w/w), 18% (w/w), 19% (w/w), 20% (w/w), 21% (w/w), 22% (w/w), 23% (w/w), 24% (w/w), or 25% (w/w), or any value between any two of the foregoing concentration points. Digestible lysine in the diet may be 0.85% (w/w) to 1.30% (w/w). Digestible lysine may be 0.85% (w/w), 0.86% (w/w), 0.87% (w/w), 0.88% (w/w), 0.89% (w/w), 0.90% (w/w), 0.91% (w/w), 0.92% (w/w), 0.93% (w/w), 0.94% (w/w), 0.95% (w/w), 0.96% (w/w), 0.97% (w/w), 0.98% (w/w), 0.99% (w/w), 1.00% (w/w), 1.20% (w/w), or 1.30% (w/w), or any value between any two of the foregoing concentration points. Digestible methionine in the diet may be 0.45% (w/w) to 0.70% (w/w). Digestible methionine may be 0.45% (w/w), 0.50% (w/w), 0.55% (w/w), 0.60% (w/w), 0.65% (w/w), or 0.70% (w/w), or any value between any two of the foregoing concentration points. Digestible methionine and cystine in the diet may be 0.65% (w/w) to 1.10% (w/w). Digestible methionine and cystine may be 0.65% (w/w), 0.70% (w/w), 0.75% (w/w), 0.80% (w/w), 0.85% (w/w), 0.90% (w/w), 0.95% (w/w), 1.00% (w/w), 1.05% (w/w), or 1.10% (w/w), or any value between any two of the foregoing concentration points. Digestible threonine in the diet may be 0.60% (w/w) to 0.84% (w/w). Digestible threonine may be 0.60% (w/w), 0.65% (w/w), 0.70% (w/w), 0.75% (w/w), 0.80% (w/w), or 0.84% (w/w), or any value between any two of the foregoing concentration points. Digestible tryptophan in the diet may be 0.10% (w/w) to 0.25% (w/w). Digestible tryptophan may be 0.10% (w/w), 0.15% (w/w), 0.20% (w/w), or 0.25% (w/w), or any value between any two of the foregoing concentration points. Calcium in the diet may be 0.68% (w/w) to 1.10% (w/w). Calcium in the diet may be 0.68% (w/w), 0.69% (w/w), 0.70% (w/w), 0.75% (w/w), 0.80% (w/w), 0.85% (w/w), 0.90% (w/w), 0.95% (w/w), 1.00% (w/w), or 1.10% (w/w), or any value between any two of the foregoing concentration points. Available phosphorus in the diet may be 0.17% (w/w) to 0.60% (w/w). Available phosphorus may be 0.17% (w/w), 0.18% (w/w), 0.19% (w/w), 0.20% (w/w), 0.25% (w/w), 0.30% (w/w), 0.35% (w/w), 0.40% (w/w), 0.45% (w/w), 0.50% (w/w), 0.55% (w/w), or 0.60% (w/w), or any value between any two of the foregoing concentration points. Sodium in the diet may be 0.17% (w/w) to 0.19% (w/w). Sodium may be 0.17% (w/w), 0.18% (w/w), or 0.19% (w/w), or any value between any two of the foregoing concentration points. Phytase in the diet may be 500 FTU/kg (w/w) to 8,000 FTU/kg (w/w). Phytase may be 500 FTU/kg (w/w), 600 FTU/kg (w/w), 700 FTU/kg (w/w), 800 FTU/kg (w/w), 900 FTU/kg (w/w), 1000 FTU/kg (w/w), 1100 FTU/kg (w/w), 1200 FTU/kg (w/w), 1300 FTU/kg (w/w), 1400 FTU/kg (w/w), 1500 FTU/kg (w/w), 1600 FTU/kg (w/w), 1700 FTU/kg (w/w), 1800 FTU/kg (w/w), 1900 FTU/kg (w/w), 2000 FTU/kg (w/w), 2100 FTU/kg (w/w), 2200 FTU/kg (w/w), 2300 FTU/kg (w/w), 2400 FTU/kg (w/w), 2500 FTU/kg (w/w), 2600 FTU/kg (w/w), 2700 FTU/kg (w/w), 2800 FTU/kg (w/w), 2900 FTU/kg (w/w), 3000 FTU/kg (w/w), 3100 FTU/kg (w/w), 3200 FTU/kg (w/w), 3300 FTU/kg (w/w), 3400 FTU/kg (w/w), 3500 FTU/kg (w/w), 3600 FTU/kg (w/w), 3700 FTU/kg (w/w), 3800 FTU/kg (w/w), 3900 FTU/kg (w/w), 4000 FTU/kg (w/w), 4100 FTU/kg (w/w), 4200 FTU/kg (w/w), 4300 FTU/kg (w/w), 4400 FTU/kg (w/w), 4500 FTU/kg (w/w), 4600 FTU/kg (w/w), 4700 FTU/kg (w/w), 4800 FTU/kg (w/w), 4900 FTU/kg (w/w), 5000 FTU/kg (w/w), 5100 FTU/kg (w/w), 5200 FTU/kg (w/w), 5300 FTU/kg (w/w), 5400 FTU/kg (w/w), 5500 FTU/kg (w/w), 5600 FTU/kg (w/w), 5700 FTU/kg (w/w), 5800 FTU/kg (w/w), 5900 FTU/kg (w/w), 6000 FTU/kg (w/w), 6100 FTU/kg (w/w), 6200 FTU/kg (w/w), 6300 FTU/kg (w/w), 6400 FTU/kg (w/w), 6500 FTU/kg (w/w), 6600 FTU/kg (w/w), 6700 FTU/kg (w/w), 6800 FTU/kg (w/w), 6900 FTU/kg (w/w), 7000 FTU/kg (w/w), 7100 FTU/kg (w/w), 7200 FTU/kg (w/w), 7300 FTU/kg (w/w), 7400 FTU/kg (w/w), 7500 FTU/kg (w/w), 7600 FTU/kg (w/w), 7700 FTU/kg (w/w), 7800 FTU/kg (w/w), 7900 FTU/kg (w/w), or 8,000 FTU/kg (w/w), or any value between any two of the foregoing concentration points. The concentration of each ingredient within any one of the ranges herein may be any value between any two of the concentration points included in the range. Variations in the concentrations of these ingredients may also be used in a diet.

[0139] The method may include mixing a transgenic, intragenic or cisgenic maize plant or part thereof with a feed ingredient to obtain a mixture. The feed ingredient may be one or more ingredients included in the diet described herein. The transgenic, intragenic or cisgenic maize plant or part thereof may be any transgenic, intragenic or cisgenic maize plant or part thereof described herein. The mixture may contain a gastric labile phytase. The mixture may contain a gastric stable phytase. The method may include feeding an animal with the mixture. The body weight gain (BWG) in an animal fed with the mixture comprising a phytase may be higher than the BWG in a control animal fed with identical feed ingredients not mixed with a transgenic plant including a phytase. In an embodiment, the BWG in an animal fed with the mixture comprising a phytase may be similar to the BWG in a control animal fed with a high energy diet or a diet that includes more or higher concentrations of the ingredients compared to the mixture including a phytase. In an embodiment, the BWG in an animal fed with a mixture comprising phytase may be greater than the BWG in a control animal fed the same mixture, or the same mixture including a lower dose of phytase. In an embodiment, the BWG in an animal fed with a mixture comprising phytase at a dose between 3000 FTU/kg up to and including 60,000 FTU/kg with high or adequate dietary phosphate may be greater than the BWG in a control animal fed the same mixture with a phytase dose below 3000 FTU/kg. In an embodiment, the feed conversion ratio (FCR) in an animal fed with the mixture comprising a phytase may be lower than the FCR in a control animal fed with identical feed ingredients not mixed with a transgenic plant including a phytase. The FCR is defined as the mass of the feed eaten by the animal divided by the animal's mass. In an embodiment, the FCR in an animal fed with the mixture comprising a phytase may be similar to the FCR in a control animal fed with a high energy diet or a diet that includes more or higher concentrations of the ingredients compared to the mixture including a phytase. In an embodiment, the FCR in an animal fed with a mixture comprising phytase may be equal to the FCR in a control animal fed a similar mixture with lower dietary phosphate, amino acids, or energy, or the same mixture including a lower dose of phytase. In an embodiment, the FCR in an animal fed with a mixture comprising phytase at a dose between 3000 FTU/kg up to and including 60,000 FTU/kg with high or adequate dietary phosphate may be equal to the FCR in a control animal fed a similar mixture with a phytase dose below 3000 FTU/kg and with a lower dietary phosphate, amino acid, or energy concentration.

[0140] In an embodiment, a method of reducing the ratio of feed intake per the breast meat weight in an animal is provided. The method may include feeding the animal with a diet comprising a phytase. The phytase may be provided at a dose equal to, or greater than, 1000 FTU/kg. The phytase may be at a dose equal to, or greater than, 1000 FTU/kg but lesser than, or equal to, 4500 FTU/kg. The diet may include an adequate or reduced amount of Ca. The adequate amount of Ca may be 1.0% (w/w) of Ca in a diet. The reduced amount of Ca may be 0.95% (w/w), 0.9% (w/w), 0.85% (w/w), or 0.8% (w/w), or any value between any two of the foregoing concentration points. The reduced amount of Ca may be 0.79% (w/w), or lower amount of Ca in a diet. The diet may include an adequate or reduced amount of available phosphate. The adequate amount of available phosphate may be 0.5% (w/w) of phosphate in a diet. The reduced amount of available phosphate may be 0.45% (w/w), 0.4% (w/w), 0.35% (w/w), 0.3% (w/w), or any value between any two of the foregoing concentration points. The reduced amount of available phosphate may be 0.29% (w/w), or lower amount of phosphate in a diet. The diet may include an adequate or reduced amount of one or more amino acids. The one or more amino acid may be a digestable lysine. The adequate amount of the digestable lysine may be greater or equal to 1.19% (w/w). The reduced amount of the digestable lysine may be lesser or equal to 1.18% (w/w), 1.16% (w/w), 1.14% (w/w), 1.12% (w/w), 1.1% (w/w), 1.0% (w/w), 0.9% (w/w), 0.98% (w/w), 0.96% (w/w), 0.94% (w/w), 0.92% (w/w), 0.90% (w/w), or 0.8% (w/w) of the digestable lysine, or any value between any two of the foregoing concentration points. The one or more amino acids may be a combination of a digestable methionine and a digestable cysteine. The adequate amount of the combination of the digestable methionine and the digestable cysteine may be greater or equal to 0.89% (w/w). The reduced amount of the combination of the digestable methionine and the digestable cysteine may be lesser or equal to 0.88% (w/w), 0.87% (w/w), 0.86% (w/w), 0.85% (w/w), 0.84% (w/w), 0.83% (w/w), 0.82% (w/w), 0.81% (w/w), 0.80% (w/w), 0.79% (w/w), 0.78% (w/w), 0.77% (w/w), 0.76% (w/w), 0.75% (w/w), 0.74% (w/w), 0.73% (w/w), 0.72% (w/w), 0.71% (w/w), 0.70% (w/w), or 0.69% (w/w) of the combination of the digestable methionine and the digestable cysteine, or any value between any two of the foregoing concentration points. The one or more amino acids may be a digestable threonine. The adequate amount of the digestable threonine may be greater or equal to 0.78% (w/w). The reduced amount of the digestable threonine may be lesser or equal than 0.77% (w/w), 0.76% (w/w), 0.75% (w/w), 0.76% (w/w), 0.75% (w/w), 0.74% (w/w), 0.73% (w/w), 0.72% (w/w), 0.71% (w/w), 0.70% (w/w), 0.69% (w/w), 0.68% (w/w), 0.67% (w/w), 0.66% (w/w), 0.65% (w/w), 0.64% (w/w), 0.63% (w/w), 0.62% (w/w), 0.61% (w/w), or 0.60% (w/w) of the digestable threonine, or any value between any two of the foregoing concentration points. The one or more amino acids may be any other amino acid commonly used in the diet. The diet may include adequate or reduced energy levels of the ingredients. The adequate energy level of the ingredients may be greater or equal to 1460 kcal/lb. The reduced energy level of the ingredients may be lesser or equal to 1450 kcal/lb, 1440 kcal/lb, 1430 kcal/lb, 1420 kcal/lb, 1410 kcal/lb, 1400 kcal/lb, 1390 kcal/lb, 1380 kcal/lb, 1370 kcal/lb, 1360 kcal/lb, 1350 kcal/lb, 1340 kcal/lb, 1330 kcal/lb, 1320 kcal/lb, or 1310 kcal/lb, or any value between any two of the foregoing energy level points. The ratio of feed intake divided by the breast meat weight may be decreased in an animal fed the diet including phytase relative to an animal fed the same diet with a lower dose of phytase or no phytase.

[0141] In an embodiment, a method of increasing a breast meat weight in an animal is provided. The method may include feeding the animal with a diet comprising a phytase. The phytase may be provided at a dose equal to, or greater than, 1000 FTU/kg. The phytase may be at a dose equal to, or greater than, 1000 FTU/kg but lesser than, or equal to, 6000 FTU/kg. The phytase may be at a dose of 1000 FTU/kg, 2000 FTU/kg, 3000 FTU/kg, 4000 FTU/kg, 5000 FTU/kg, or 6000 FTU/kg, or any value between any two of the foregoing concentration points. The diet may include an adequate or reduced amount of Ca. The adequate amount of Ca may be 1.0% (w/w) of Ca in a diet. The reduced amount of Ca may be 0.95% (w/w), 0.9% (w/w), 0.85% (w/w), 0.8% (w/w), or any value between any two of the foregoing concentration points. The reduced amount of Ca may be 0.79% (w/w) or lower amount of Ca in a diet. The diet may include an adequate or reduced amount of available phosphate. The adequate amount of available phosphate may be 0.5% (w/w) of phosphate in a diet. The reduced amount of available phosphate may be 0.45% (w/w), 0.4% (w/w), 0.35% (w/w), 0.3% (w/w), or any value between any two of the foregoing concentration points. The reduced amount of phosphate may be 0.29% (w/w), or lower amount of phosphate in a diet. The diet may include an adequate or reduced amount of one or more amino acids. The one or more amino acid may be a digestable lysine. The adequate amount of the digestable lysine may be greater or equal to 1.19% (w/w). The reduced amount of the digestable lysine may be lesser or equal to 1.18% (w/w), 1.16% (w/w), 1.14% (w/w), 1.12% (w/w), 1.1% (w/w), 1.0% (w/w), 0.9% (w/w), 0.98% (w/w), 0.96% (w/w), 0.94% (w/w), 0.92% (w/w), 0.90% (w/w), or 0.8% (w/w) of the digestable lysine, or any value between any two of the foregoing concentration points. The one or more amino acids may be a combination of a digestable methionine and a digestable cysteine. The adequate amount of the combination of the digestable methionine and the digestable cysteine may be greater or equal to 0.89% (w/w). The reduced amount of the combination of the digestable methionine and the digestable cysteine may be lesser or equal to 0.88% (w/w), 0.87% (w/w), 0.86% (w/w), 0.85% (w/w), 0.84% (w/w), 0.83% (w/w), 0.82% (w/w), 0.81% (w/w), 0.80% (w/w), 0.79% (w/w), 0.78% (w/w), 0.77% (w/w), 0.76% (w/w), 0.75% (w/w), 0.74% (w/w), 0.73% (w/w), 0.72% (w/w), 0.71% (w/w), 0.70% (w/w), or 0.69% (w/w) of the combination of the digestable methionine and the digestable cysteine, or any value between any two of the foregoing concentration points. The one or more amino acids may be a digestable threonine. The adequate amount of the digestable threonine may be greater or equal to 0.78% (w/w). The reduced amount of the digestable threonine may be lesser or equal than 0.77% (w/w), 0.76% (w/w), 0.75% (w/w), 0.76% (w/w), 0.75% (w/w), 0.74% (w/w), 0.73% (w/w), 0.72% (w/w), 0.71% (w/w), 0.70% (w/w), 0.69% (w/w), 0.68% (w/w), 0.67% (w/w), 0.66% (w/w), 0.65% (w/w), 0.64% (w/w), 0.63% (w/w), 0.62% (w/w), 0.61% (w/w), or 0.60% (w/w) of the digestable threonine, or any value between any two of the foregoing concentration points. The one or more amino acids may be any other amino acid commonly used in the diet. The diet may include adequate or reduced energy levels of the ingredients. The adequate energy level of the ingredients may be greater or equal to 1460 kcal/lb. The reduced energy level of the ingredients may be lesser or equal to 1450 kcal/lb, 1440 kcal/lb, 1430 kcal/lb, 1420 kcal/lb, 1410 kcal/lb, 1400 kcal/lb, 1390 kcal/lb, 1380 kcal/lb, 1370 kcal/lb, 1360 kcal/lb, 1350 kcal/lb, 1340 kcal/lb, 1330 kcal/lb, 1320 kcal/lb, or 1310 kcal/lb, or any value between any two of the foregoing concentration points. The breast meat weight may be increased in an animal fed the diet including phytase relative to an animal fed the same diet with a lower dose of phytase or no phytase.

[0142] The following list includes particular embodiments of the present invention. But the list is not limiting and does not exclude alternate embodiments, as would be appreciated by one of ordinary skill in the art.

### Embodiments

[0143] 1. A maize plant or part thereof comprising one or more synthetic nucleic acids, wherein the one or more synthetic nucleic acids comprise a sequence with at least 90% identity to a sequence selected from the group consisting of: SEQ ID NOS: 11, 13, 15, 17, 19, 21, 23, 25, and 27, or a complement thereof, or the one or more synthetic nucleic acids encode a phytase comprising an amino acid sequence with at least 90% identity to a sequence selected from the group consisting of: SEQ ID NO: 12, 14, 16, 18, 20, 22, 24, 26, and 28.
2. The maize plant or part thereof of embodiment 1, wherein the phytase comprises a sequence with at least 90% identity to a sequence of SEQ ID NO: 12 and a conserved domain having at least 98% identity to amino acid residues 173-383 of SEQ ID NO: 12.
3. The maize plant or part thereof of embodiment 1, wherein the phytase comprises an amino acid sequence with at least 90% identity to an amino acid sequence of SEQ ID NO: 22, and a conserved domain with at least 98% identity to amino acid residues 16-306 of SEQ ID NO: 22.
4. The maize plant or part thereof of embodiment 1, wherein the phytase comprises an amino acid sequence with at least 90% identity to a sequence of SEQ ID NO: 26, and a conserved domain with at least 98% identity to amino acid residues 170-202 of SEQ ID NO: 26.
5. The maize plant or part thereof of embodiment 1, wherein the phytase comprises a sequence with at least 90% identity to a sequence of SEQ ID NO: 28, and a conserved domain with at least 98% identity to amino acid residues 16-306 of SEQ ID NO: 28.
6. The maize plant or part thereof of any one or more of the preceding embodiments, wherein the one or more synthetic nucleic acids are included in an expression cassette.
7. The maize plant or part thereof of embodiments 6, wherein the expression cassette comprises at least one regulatory element operably connected to the synthetic nucleic acid and is selected from the group consisting of: a promoter, a signal peptide, and a terminator.
8. The maize plant or part thereof of embodiment 7 comprising the promoter comprising a sequence with at least 90% identity to a reference sequence selected from the group consisting of: SEQ ID NOS: 1-6.
9. The maize plant or part thereof of any one or more of embodiments 7-8 comprising the signal peptide having a sequence with at least 90% identity to a reference sequence selected from the group consisting of: SEQ ID NOS: 7-10 and 31.
10. The maize plant or part thereof of any one or more of embodiments 7-9 comprising the terminator having a sequence with at least 90% identity to a reference sequence selected from the group consisting of: SEQ ID NOS: 33-35.
11. The maize plant or part thereof of any one or more of the preceding embodiments, wherein the expression cassette comprises a polynucleotide with at least 90% identity to a sequence selected from the group consisting of: SEQ ID NOS: 36, 46-98, 138-149, and 181.
12. A maize plant or part thereof comprising one or more synthetic polynucleotides selected from the group consisting of: SEQ ID NOS: 42, 43, 125, 154, 156, 157, 158, 159, and 175.
13. The maize plant or part thereof of embodiment 12, wherein the one or more synthetic polynucleotides comprise a sequence of SEQ ID NO: 42 or 43, and produce a diagnostic amplicon for identifying event PY203.
14. The maize plant or part thereof of embodiment 12, wherein the one or more synthetic polynucleotides comprise the sequence of SEQ ID NO: 125, and produce a diagnostic amplicon for identifying event PY15.
15. The maize plant or part thereof of embodiment 12, wherein the one or more synthetic polynucleotides comprise the sequence of SEQ ID NO: 154, and produce a diagnostic amplicon for identifying event PY209.
16. The maize plant or part thereof of embodiment 12, wherein the one or more synthetic polynucleotides comprise the sequence of SEQ ID NOS: 156 and 157, and produce a diagnostic amplicon for identifying event PY1053.
17. The maize plant or part thereof of embodiment 12, wherein the one or more synthetic polynucleotides comprise the sequence of SEQ ID NOS: 158 and 159, and produce a diagnostic amplicon for identifying event PY1203.
18. The maize plant or part thereof of embodiment 12, wherein the one or more synthetic polynucleotides comprise the sequence of SEQ ID NO: 175, and produce a diagnostic amplicon for identifying event PY53.
19. A progeny of the maize plant of any one or more of the preceding embodiments.
20. A maize plant or part thereof of any one or more of embodiments 1-18 or the progeny of embodiment 19, wherein the phytase is a gastric labile phytase.
21. A kit for identifying event PY15, PY53, PY203, PY209, PY1053, or PY1203 in a sample, wherein the kit comprises a first primer and a second primer, which are capable of amplifying a synthetic polynucleotide selected from the group consisting of SEQ ID NOS: 126, 128, 130, 131, 133, 135, 136, and 176-184.
22. The kit of embodiment 21, wherein the first primer is a sequence selected from the group consisting of SEQ ID NOS: 100, 105, 107, 110, 120, 121, 161 and 172, and the second primer is a sequence selected from the group consisting of SEQ ID NOS: 99, 104, 109, 119, 164, 170, 171, 173, and 174.
23. A kit for identifying event PY15, PY53, PY203, PY209, PY1053 or PY1203 in a sample, wherein the kit comprises a probe capable of hybridizing to a synthetic polynucleotide comprising a sequence selected from the group consisting of SEQ ID NO: 42, 43, 125, 154, 156, 157, 158, 159, and 175 under conditions of high stringency.
24. A kit for identifying a maize plant or part thereof comprising a phytase in a sample, wherein the kit comprises a probe capable of hybridizing to a synthetic polynucleotide comprising a sequence selected from the group consisting of SEQ ID NO: 36-37, 46-98, 138-149, and 181 under conditions of high stringency.
25. A method of identifying event PY15, PY53, PY203, PY209, PY1053 or PY1203 in a sample comprising:

[0144] contacting a sample with a first primer and a second primer; and

[0145] amplifying a synthetic polynucleotide comprising a PY15, PY53, PY203, PY209, PY1053 or PY1203 specific region.

26. A method of identifying event PY15, PY53, PY203, PY209, PY1053 or PY1203 in a sample comprising:

[0146] contacting a sample with at least one nucleic acid probe that hybridizes to a PY15, PY53, PY203, PY209, PY1053 or PY1203 specific region under conditions of high stringency; and

[0147] detecting hybridization of the at least one nucleic acid probe to the PY15, PY53, PY203, PY209, PY1053 or PY1203 specific region.

27. The method of embodiment 26, wherein the at least one nucleic acid probe is selected from the sequence of SEQ ID NOS: 102-103, 112-115, 122-123, 162-163, and 169.
28. An animal feedstock comprising a maize plant or part thereof of any one or more of embodiments 1-18, and 20 or the progeny of any one or both embodiments 19 and 20.
29. The animal feedstock of embodiment 28 further comprising a feed supplement.
30. The animal feedstock of embodiment 28, wherein the feed supplement is plant material.
31. The animal feedstock of embodiment 30, wherein the plant material is a non-transgenic plant or an engineered plant.
32. The animal feedstock of any one or more of embodiments 28-31, wherein the feed supplement includes one or more exogenous enzymes.
33. The animal feedstock of embodiment 32, wherein the one or more exogenous enzymes includes a hydrolytic enzyme selected from the group consisting of: xylanase, endoglucanase, cellulase, protease, glucanase, amylase and mannanase.
34. The animal feedstock of any one or more of embodiments 28-33, wherein the plant material includes at least one component selected from the group consisting of: corn meal, corn pellets, wheat meal, wheat pellets, wheat grain, barley grain, barley pellets, soybean meal, soybean oilcake, sorghum grain and sorghum pellets.
35. The animal feedstock of any one or more of embodiments 28-34, wherein the feed supplement includes at least one component selected from the group consisting of: soluble solids, fat and vermiculite, limestone, plain salt, DL-methionine, L-lysine, L-threonine, COBAN®, vitamin premix, dicalcium phosphate, selenium premix, choline chloride, sodium chloride, and mineral premix.
36. The animal feedstock of any one or more of embodiments 28-35 comprising a phytase dose greater than or equal to 3000 FTU/kg and lesser than or equal to 60,000 FTU/kg.
37. The animal feedstock of any one or more of embodiments 28-36 comprising a phosphate level greater than or equal to 0.35% (w/w), 0.40% (w/w), 0.45% (w/w), 0.50% (w/w), 0.55% (w/w), or 0.60% (w/w) of phosphate per animal feedstock.
38. The animal feedstock of any one or more of embodiments 28-37, wherein any amino acid dose is reduced.
39. The animal feedstock of embodiment 38, wherein any amino acid is a digestable lysine, and the reduced dose is lesser or equal to 1.18% (w/w), 1.16% (w/w), 1.14% (w/w), 1.12% (w/w), 1.1% (w/w), 1.0% (w/w), 0.9% (w/w), 0.98% (w/w), 0.96% (w/w), 0.94% (w/w), 0.92% (w/w), 0.90% (w/w), or 0.8% (w/w) of the digestable lysine.
40. The animal feedstock of embodiment 38, wherein any amino acid is a combination of a digestable methionine and a digestable cysteine, and the reduced dose is lesser or equal to 0.88% (w/w), 0.87% (w/w), 0.86% (w/w), 0.85% (w/w), 0.84% (w/w), 0.83% (w/w), 0.82% (w/w), 0.81% (w/w), 0.80% (w/w), 0.79% (w/w), 0.78% (w/w), 0.77% (w/w), 0.76% (w/w), 0.75% (w/w), 0.74% (w/w), 0.73% (w/w), 0.72% (w/w), 0.71% (w/w), 0.70% (w/w), or 0.69% (w/w) of the combination of the digestable methionine and the digestable cystein.
41. The animal feedstock of embodiment 38, wherein any amino acid is a digestable threonine, and the reduced dose is lesser or equal to 0.77% (w/w), 0.76% (w/w), 0.75% (w/w), 0.76% (w/w), 0.75% (w/w), 0.74% (w/w), 0.73% (w/w), 0.72% (w/w), 0.71% (w/w), 0.70% (w/w), 0.69% (w/w), 0.68% (w/w), 0.67% (w/w), 0.66% (w/w), 0.65% (w/w), 0.64% (w/w), 0.63% (w/w), 0.62% (w/w), 0.61% (w/w), or 0.60% (w/w) of the digestable threonine.
42. The animal feedstock of any one or more of embodiments 28-41, wherein the energy level of ingredients of the animal feedstock is reduced.
43. The animal feedstock of embodiment 42, wherein the reduced energy level of the ingredients is lesser or equal to 1450 kcal/lb, 1440 kcal/lb, 1430 kcal/lb, 1420 kcal/lb, 1410 kcal/lb, 1400 kcal/lb, 1390 kcal/lb, 1380 kcal/lb, 1370 kcal/lb, 1360 kcal/lb, 1350 kcal/lb, 1340 kcal/lb, 1330 kcal/lb, 1320 kcal/lb, or 1310 kcal/lb.
44. The animal feedstock of any one or more of embodiments 28-43, wherein the phytase is gastric labile.
45. A method of producing an animal feedstock comprising mixing a maize plant or part thereof of any one or more of embodiments 1-18, and 20 or the progeny of any one or both of embodiment 19 and 20 with plant material.
46. The method of embodiment 45 further comprising pelletizing the mixture.
47. The method of any one or both of embodiments 45 or 46 further comprising adding a feed supplement to the mixture.
48. The method of embodiment 47, wherein the feed supplement includes at least one exogenous enzyme.
49. The method of embodiment 48, wherein the at least one exogenous enzyme is a hydrolase selected from the group consisting of: xylanase, mannanase, protease, glucanase, and cellulase.
50. A method of promoting the release of inorganic phosphate from a phytic acid or phytate in an animal comprising feeding an animal with an animal feedstock comprising a maize plant or part thereof of any one or more of embodiments 1-18, and 20 or the progeny of any one or both of embodiments 19 and 20.
51. The method of embodiment 43 further comprising preparing the animal feedstock according to a method of any one or more of embodiments 45-49.
52. The method of any one or both of embodiments 50 or 51, wherein the animal is a monogastric animal or a ruminant animal.
53. A method of producing an animal meat comprising feeding an animal with an animal feedstock comprising a maize plant or part thereof of any one or more of embodiments 1-18, and 20, or the progeny of embodiment 19.
54. The method of embodiment 53 further comprising preparing the animal feedstock according to a method of any one or more of embodiments 45-49.
55. The method of any one or both embodiments 53 and 54, wherein the animal is a monogastric animal or a ruminant animal.
56. The method of any one or more of embodiments 53-55, wherein the animal is the monogastric animal, and the animal meat comprises a breast meat.
57. The method of any one or more of embodiments 53-56, wherein the animal feedstock contains a deficient or an adequate level of phosphate.
58. The method of embodiment 57, wherein animal feedstock contains the adequate level of phosphate, and the adequate level of phosphate is in a range from 0.30% (w/w) to 0.50% (w/w) of phosphate per animal feed or in a range from 0.20% (w/w) to 0.50% (w/w) of phosphate per animal feedstock.
59. The method of embodiment 57, wherein the animal feedstock contains the deficient level of phosphate, and the deficient level of phosphate is less than 20% (w/w) of phosphate per animal feed, or is less than 30% (w/w) of phosphate per animal feedstock.
60. The method of any one or more of embodiments 53-59 wherein the maize plant or part thereof comprises a phytase at a dose equal to 3000 FTU/kg, or greater.
61. The method of any one or more of embodiments 53-59, wherein the maize plant or part thereof comprises a phytase at a dose equal to 60,000 FTU/kg, or lesser.
62. A method of reducing the ratio of intake of an animal feed per weight of the meat in an animal comprising feeding an animal with an animal feedstock comprising a phytase.
63. The method of embodiment 62, wherein the animal feedstock comprise a maize plant or part thereof of any one of claims 1-18, and 20, or the progeny of embodiment 19.
64. The method of any one or both of embodiments 62-63, wherein the phytase is at a dose equal to 3000 FTU/kg, or greater.
65. The method of any one or more of embodiments 62-63, wherein the phytase is at a dose equal to 60,000 FTU/kg, or lesser.
66. The method of any one or more of embodiments 62-65, wherein the animal feed includes an adequate or reduced level of one or more amino acids.
67. The method of embodiment 66, wherein the one or more amino acids is selected from the group consisting of: digestable lysine, digestable methionine, digestable cystein and digestable threonine.
68. The method of embodiment 67, wherein the one or more amino acid is digestable threonine.
69. The method of embodiment 68, wherein the adequate amount of digestable threonine is equal to 0.78% (w/w), or greater, of threonine per animal feedstock.
70. The method of embodiment 68, wherein the reduced amount of digestable threonine is in a range of 0.60% (w/w) to 0.77% (w/w) of threonine per animal feedstock.
71. The method of embodiment 67, wherein the one or more amino acid is digestable lysine.
72. The method of embodiment 71, wherein the adequate amount of digestable lysine is equal to 1.19% (w/w), or greater, of lysine per animal feedstock.
73. The method of embodiment 71, wherein the reduced amount of digestable lysine is in a range of 0.18% (w/w) to 0.80% (w/w) of lysine per animal feedstock.
74. The method of embodiment 67, wherein the one or more amino acid is a combination of a digestable methionine and a digestable cysteine.
75. The method of embodiment 74 wherein the adequate amount of the combination of the digestable methionine and the digestable cysteine is equal to 0.89% (w/w), or greater, of the combination per animal feedstock.
76. The method of embodiment 74, wherein the reduced amount of the combination of the digestable methionine and the digestable cysteine is in a range of 0.69% (w/w) to 0.88% (w/w) of the combination per animal feedstock.
77. The method of any one or more of embodiments 62-76, wherein the animal feedstock contains an adequate or reduced energy level of ingredients.
78. The method of embodiment 77, wherein the animal feedstock contains the adequate energy level of the ingredients, wherein the adequate energy level is equal to 1460 kcal/lb, or greater.
79. The method of embodiment 77, wherein the animal feedstock contains the reduced energy level of the ingredients, wherein the reduced energy level is equal to 1310 kcal/lb, or greater, or less than 1460 kcal/lb.
80. The method of any one or more of embodiments 62-79, wherein the animal feedstock contains a deficient or an adequate level of phosphate.
81. The method of embodiment 80, wherein animal feedstock contains the adequate level of phosphate, and the adequate level of phosphate is in a range from 0.30% (w/w) to 0.50% (w/w) of phosphate per animal feed, or in a range from 0.20% (w/w) to 0.50% (w/w) of phosphate per animal feed.
82. The method of embodiment 80, wherein the animal feedstock contains the deficient level of phosphate, and the deficient level of phosphate is less than 20% (w/w) of phosphate per animal feed, or is less than 30% (w/w) of phosphate per animal feed.
83. The method of any one or more of embodiments 62-82, wherein the animal feedstock contains a deficient or an adequate level of Ca.
84. The method of embodiment 83, wherein animal feedstock contains the adequate level of Ca and the adequate level of Ca is 1.0 (w/w) of Ca per animal feed.
85. The method of embodiment 83, wherein the animal feedstock contains the deficient level of Ca, and the deficient level of Ca is equal to 0.95% (w/w) of Ca per animal feed, or less.
86. The method of any one or more of embodiments 62-85, wherein the ratio is reduced in an animal fed with the animal feedstock comprising phytase compared to an animal fed with a similar animal feedstock containing no phytase or a lower dose of phytase.

[0148] Further embodiments herein may be formed by supplementing an embodiment with one or more element from any one or more other embodiment herein, and/or substituting one or more element from one embodiment with one or more element from one or more other embodiment herein.

### EXAMPLES

[0149] The following non-limiting examples are provided to illustrate particular embodiments. The embodiments throughout may be supplemented with one or more detail from one or more example below, and/or one or more element from an embodiment may be substituted with one or more detail from one or more example below.

### Example 1. Descriptions of Expression Cassettes for Phytases

[0150] Phytases genes encoding phytase forms have been modified to improve performance as components of feed for monogastric and ruminant animals. These phytases can be expressed directly in feed components such as corn grain and incorporated into animal diets, for example in mash or pelleted feeds for monogastric animals, or in silage or grain for ruminants. Diets containing these plant-expressed phytases require less exogenous inorganic phosphate, and potentially fewer minerals and less energy, to support efficient animal growth. Plant phytases can be expressed intragenically in maize and other crop plants.

[0151] Over-expression of plant phytases in plants can be used to increase the feed value of the resulting grain when used as a macrocomponent, microcomponent, or feed additive in animal diets. It also can improve phosphate utilization by the plant. Expressing plant derived phytases, as opposed to microbially derived phytases, in plant species also presents fewer perceived risks to the food chain since these enzymes are already present in the food chain and there is a long history of their tolerance and safe use.

[0152] Codon optimized nucleotide sequences for expression of the phytases Phy-02, Phy-02opt, Phy-03, PhyNov9x and PhyQB in maize were synthesized. For generating initial plant transformation constructs, expression cassettes were assembled in transformation vectors. The expression cassettes included the following elements.

[0153] Promoters:

[0154] maize globulin 1 promoter (SEQ ID NO: 124), maize oleosin 16 (SEQ ID NO: 1), maize PEP carboxylase (SEQ ID NO: 2), maize ubiquitin 1 (with intron) (SEQ ID NO: 3), maize gamma zein 27 (SEQ ID NO: 4), rice glutelin 1 (SEQ ID NO: 5), and rice glutelin B4 (SEQ ID NO: 6).

[0155] Signal Peptides:

[0156] maize gamma zein 27_coding sequence (SEQ ID NO: 7) and polypeptide sequence (SEQ ID NO: 8), rice glutelin B4 coding sequence (SEQ ID NO: 9) and polypeptide sequence (SEQ ID NO: 10).

[0157] Coding Nucleic Acid Sequences and Amino Acid Sequences of Phytases:

[0158] PAPhy_b1: coding sequence (SEQ ID NO: 11) and polypeptide sequence (SEQ ID NO: 12), PAPhy_b2: coding sequence (SEQ ID NO: 13) and polypeptide sequence (SEQ ID NO: 14), Phy-02: coding sequence (SEQ ID NO: 15) and polypeptide sequence (SEQ ID NO: 16), Phy-02opt: coding sequence (SEQ ID NO: 17) and polypeptide sequence (SEQ ID NO: 18), Phy-03: coding sequence (SEQ ID NO: 19) and polypeptide sequence (SEQ ID NO: 20), PhyNov9X: coding sequence (SEQ ID NO: 21) and polypeptide sequence (SEQ ID NO: 22), PhyQB: coding sequence (SEQ ID NO: 23) and polypeptide sequence (SEQ ID NO: 24), ZmPhy1: coding sequence (SEQ ID NO: 25) and polypeptide sequence (SEQ ID NO: 26), ZmPhy2: coding sequence (SEQ ID NO: 27) and polypeptide sequence (SEQ ID NO: 28).

[0159] C-Terminal Extensions:

[0160] HvVSD (from the Hordeum vulgare vacuolar sorting determinant (Cervelli et al., 2004)): coding sequence (SEQ ID NO: 29) and polypeptide sequence (SEQ ID NO: 30); SEKDEL (SEQ ID NO: 32) (Endoplasmic reticulum retention signal; (Arakawa, Chong, & Langridge, 1998; Haq, Mason, Clements, & Arntzen, 1995; Korban, 2002; Munro & Pelham, 1987)): coding sequence (SEQ ID NO: 31) and polypeptide sequence (SEQ ID NO: 32).

[0161] Terminators/Polyadenylation Signals:

[0162] NOS (from the Agrobacterium tumefaciens nopaline synthase gene): DNA sequence (SEQ ID NO: 33), CaMV 35s (from the cauliflower mosaic virus 35s transcript; the sequence includes an intron from the maize PEP carboxylase gene): DNA sequence (SEQ ID NO: 34), maize globulin 1: DNA sequence (SEQ ID NO: 35).

[0163] The expression cassettes were inserted in the vectors described in Tables 1-6.

TABLE 1
Expression Cassettes in Vectors for Maize-derived Phytase

| | SEQ | | | | |
|---|---|---|---|---|---|
| Expression | ID | | Signal | Coding | |
| cassette* | NO | Promoter | peptide | sequence | Terminator |
| pAG4910 | 46 | Maize | Maize | PAPhy_b1 | Maize |
| | | oleosin 16 | gamma | | globulin 1 |
| | | | zein 27 | | |
| pAG4902 | 47 | Maize | Maize | PAPhy_b1 | Maize |
| | | gamma | gamma | | globulin 1 |
| | | zein 27 | zein 27 | | |
| pAG4911 | 48 | Maize | Maize | PAPhy_b2 | Maize |
| | | oleosin 16 | gamma | | globulin 1 |
| | | | zein 27 | | |
| pAG4903 | 49 | Maize | Maize | PAPhy_b2 | Maize |
| | | gamma | gamma | | globulin 1 |
| | | zein 27 | zein 27 | | |
| pAG4908 | 50 | Maize | Maize | ZmPhy1 | Maize |
| | | oleosin 16 | gamma | | globulin 1 |
| | | | zein 27 | | |
| pAG4900 | 51 | Maize | Maize | ZmPhy1 | Maize |
| | | gamma | gamma | | globulin 1 |
| | | zein 27 | zein 27 | | |
| pAG4909 | 52 | Maize | Maize | ZmPhy2 | Maize |
| | | oleosin 16 | gamma | | globulin 1 |
| | | | zein 27 | | |
| pAG4901 | 53 | Maize | Maize | ZmPhy2 | Maize |
| | | gamma | gamma | | globulin 1 |
| | | zein 27 | zein 27 | | |
| pAG4904 | 138 | Maize | Maize | ZmPhy1 | Maize |
| | | globulin 1 | gamma | | globulin 1 |
| | | | zein 27 | | |
| pAG4905 | 139 | Maize | Maize | ZmPhy2 | Maize |
| | | globulin 1 | gamma | | globulin 1 |
| | | | zein 27 | | |
| pAG4906 | 140 | Maize | Maize | PAPhy_b1 | Maize |
| | | globulin 1 | gamma | | globulin 1 |
| | | | zein 27 | | |
| pAG4907 | 141 | Maize | Maize | PAPhy_b2 | Maize |
| | | globulin 1 | gamma | | globulin 1 |
| | | | zein 27 | | |

*Expression cassettes are denoted by names of the transformation vectors that contained the cassettes.

TABLE 2
Maize Phytase Sequences in pAG1900-4911 Expression Constructs

| | | Phytase AA* |
|---|---|---|
| Maize phytase | Vectors | SEQ ID NO |
| ZmPhy1 | pAG4900, pAG4904, | 26 |
| | pAG4908 | |
| ZmPhy2 | pAG4901, pAG4905, | 28 |
| | pAG4909 | |
| ZmPAPhy_b1 | pAG4902, pAG4906, | 12 |
| | pAG4910 | |
| ZmPAPhy_b2 | pAG4903, pAG4907, | 14 |
| | pAG4911 | |

*amino acid sequence

[0164] CLUSTAL O(1.2.1) multiple sequence alignment of Zea mays purple acid phosphatases is provided below:

| | | |
|---|---|---|
| ACR23335 | TAVPAEPASTLSGPSRPVTVAIGDRGHAVDLPDTDPRVQRRVTGWAPEQVAVALSASPTS | 60 |
| ZmPAPb1 | TAVPAEPASTLSGPSRPVTVAIGDRGHAVDLPDTDPRVQRRVTGWAPEQIAVALSASPTS | |
| ZmPAPb2 | -----EPASTLSGPSRPVTVAIGDRGHAVDLPDTDPRVQRRVTGWAPEQIAVALSASPTS | |
| | ********************************************:********** | |
| ACR23335 | AWVSWITGDYQMGGAVEPLDPGAVGSVVRYGLAADALDHEATGESLVYSQLYPFEGLQNY | 120 |
| ZmPAPb1 | AWVSWITGDYQMGGAVEPLDPGAVGSVVRYGLAADALDHEATGESLVYSQLYPFEGLQNY | |
| ZmPAPb2 | AWVSWITGDYQMGGAVEPLDPGAVGSVVRYGLAADALDHEATGESLVYSQLYPFEGLQNY | |
| | ************************************************************ | |
| ACR23335 | TSGIIHHVRLQGLEPGTRYVYRCGDPAIPDAMSGVHAFRTMPAVGPGSYPGRIAVVGDLG | 180 |
| ZmPAPb1 | TSGIIHHVRLQGLEPGTRYLYRCGDPAIPDAMSDVHAFRTMPAVGPGSYPGRIAVVGDLG | |
| ZmPAPb2 | TSGIIHHVRLQGLEPGTRYLYRCGDPAIPDAMSDVHAFRTMPAVGPGSYPGRIAVVGDLG | |
| | *******************:************* ************************** | |
| ACR23335 | LTYNTTSTVDHLVRNRPDLVLLLGDVCYANLYLTNGTGADCYSCAFAKSTPIHETYQPRW | 240 |
| ZmPAPb1 | LTYNTTSTVDHLVRNRPDLVLLLGDVCYANLYLTNGTGADCYSCAFAKSTPIHETYQPRW | |
| ZmPAPb2 | LTYNTTSTVDHLVRNRPDLVLLLGDVCYANLYLTNGTGADCYSCAFAKSTPIHETYQPRW | |
| | ************************************************************ | |
| ACR23335 | DYWGRYMEPVTSSIPMMVVEGNHEIEQQIHNRTFAAYSSRFAFPSEESGSSSPFYYSFDA | 300 |
| ZmPAPb1 | DYWGRYMEPVTSSIPMMVVEGNHEIEQQIHNRTFAAYSSRFAFPSEESGSSSPFYYSFDA | |
| ZmPAPb2 | DYWGRYMEPVTSSIPMMVVEGNHEIEQQIHNRTFAAYSSRFAFPSEESGSSSPFYYSFDA | |
| | ************************************************************ | |
| ACR23335 | GGIHFVMLASYADYSRSGAQYKWLEADLEKVDRSVTPWLIAGWHAPWYTTYKAHYREAEC | 360 |
| ZmPAPb1 | GGIHFVMLASYADYSRSGAQYKWLEADLEKVDRSVTPWLIAGWHAPWYTTYKAHYREAEC | |
| ZmPAPb2 | GGIHFVMLASYADYSRSGAQYKWLEADLEKVDRSVTPWLIAGWHAPWYTTYKAHYREAEC | |
| | ************************************************************ | |
| ACR23335 | MRVEMEELLYAYGVDVVFTGHVHAYERSNRVFNYTLDACGPVHISVGDGGNREKMATAHA | 420 |
| ZmPAPb1 | MRVEMEELLYAYGVDVVFTGHVHAYERSNRVFNYTLDACGPVHISVGDGGNREKMATAHA | |
| ZmPAPb2 | MRVEMEELLYAYGVDVVFTGHVHAYERSNRVFNYTLDACGPVHISVGDGGNREKMATAHA | |
| | ************************************************************ | |
| ACR23335 | DEAGHCPDPASTPDPFMGGRLCAANFTSGPAAGRFCWDRQPEYSAYRESSFGHGVLEVRN | 480 |
| ZmPAPb1 | DEAGHCPDPASTPDPFMGGRLCAANFTSGPAAGRFCWDRQPEYSAYRESSFGHGVLEVRN | |
| ZmPAPb2 | DEAGHCPDPASTPDPFMGGRLCAANFTSGPAAGRFCWDRQPEYSAYRESSFGHGVLEVRN | |
| | ************************************************************ | |

| | |
|---|---|
| ACR23335 | DTHALWRWHRNQDLHA---ANVAADEVYIVREPDKCLAKTARLLAY (SEQ ID NO: 116) |
| ZmPAPb1 | DTHALWRWHRNQDLHAAAAANVAADEVYIVREPDKCLAKTARLLAY (SEQ ID NO: 12) |
| ZmPAPb2 | DTHALWRWHRNQDLHAAAAANVAADEVYIVREPDKCLAKTARLLAY (SEQ ID NO: 14) |
| | **************** *************************** |

[0165] The amino acid sequence of Zea mays phytase ACR23335 were compared to the sequences of ZmPAPb1 and ZmPAPb2. The conserved residues D, Y, N, H, and H in the alignment are shown in bold and enlarged characters. The conserved region of ZmPAPb1 and ZmPAPb2 includes amino acid residues 173-383 and amino acids D178, D205, Y208, N262, 11263, 11344 and 11381.

CLUSTAL O(1.2.1) multiple sequence alignment of Zea mays phytases is shown below:

| | | |
|---|---|---|
| ZmPhy2 | AGMTDLLMLTDKSQLQALAMLLRNNEELMMSQAIKSETERIEYLKTVSDCYTRTMKLLDD | 60 |
| AAB52233 | AGMTDLLMLTDKSQLQALAMLLRNNEELMMSQAIKSETERVEYLKTVSDCYTRTMKLLDD | |
| ZmPhy1 | AGMTDLLMLTDKSQLQALAMLLRNNEELMMSQAIKSETERVEYLKTVSDCYTRTMKLLDD | |
| | ***************************************:******************** | |
| ZmPhy2 | SMAARTTYERSGGTRSLVARDMDDYVVYGLNACLQNVRNCCVRLDAIDKLRAHYDALADA | 120 |
| AAB52233 | SMAARITYERSGGTRSLVARDMDDYVVYGLNACLQNVRNCCVRLDAIDKLRAHYDALADA | |
| ZmPhy1 | SMAARITYERSGGTRSLVARDMDDYVVYGLNACLQNVRNCCVRLDAIDKLRAHYDALADA | |
| | ***** ****************************************************** | |
| ZmPhy2 | VADPAANVEGLAAEASEYKAAMWQYCYNQRSASARAHSRAYSQALKLEGIDFAELVRRHQ | 180 |
| AAB52233 | VAEPAANVEGLAAEASEYKAAMWQYCYNQRSASARAHSRAYSQALKLEGIDFAELVRRHQ | |
| ZmPhy1 | VAEPAANVEGLAAEASEYKAAMWQYCYNQRSASARAHSRAYSQALKLEGIDFAELVRRHQ | |
| | **:********************************************************* | |
| ZmPhy2 | LRLGYGSKGEEFEDLDDTQKLEVYKQHHRRVGAGRGLPVRMFSSGRSAGGPKIAATTWAE | 240 |
| AAB52233 | LRLGYGSKGEEFEDLDDTQKLEVYNSIIVESG-RAGLPVRMFSSGRSAGGPKIAATTWAQ | |
| ZmPhy1 | LRLGYGSKGEEFEDLDDTQKLEVYNSIIVESG-RAGLPVRMFSSGRSAGGPKIAATTWAQ | |
| | ************************:. . * ***********************: | |
| ZmPhy2 | AVSVFIMAAGNLAWDVFTTEHEVEAILKGSLNLLAGLGGFAVEAVVGAAVTKAVANVGAG | 300 |
| AAB52233 | AVSVFIMAAGNLAWDVFTTEHEVEAILKGSLNLLAGLGGFAVEAVVGAAVTKAVANVAAG | |
| ZmPhy1 | AVSVFIMAAGNLAWDVFTTEHEVEAILKGSLNLLAGLGGFAVEAVVGAAVTKAVANVGAG | |
| | *********************************************************.** | |
| ZmPhy2 | VFACSLAGFVVGAIAGLIFVGVSGLLINLIIGSPRKVPDMSKLMFHTAVMPDGMALAYAV | 360 |
| AAB52233 | VFACSLAGFVVGAIAGLIFVGVSGLLINLIIGSPRKVPDMSKLMFHTAVMPDGMALAYAV | |
| ZmPhy1 | VFACSLAGFVVGAIAGLIFVGISGLLINLIIGSPRKVPDMSKLMFHTAVMPDGMALAYAV | |
| | *********************:************************************** | |
| ZmPhy2 | SH (SEQ ID NO: 28) | |
| AAB52233 | SH (SEQ ID NO: 117) | |
| ZmPhy1 | SH (SEQ ID NO: 26) | |
| | ** | |

[0166] The amino acid sequence of Zea mays phytase AAB52233 were compared to the sequences of ZmPhy1 and ZmPhy2. The conserved residues R and H in the alignment are shown in bold and enlarged characters. The conserved region of ZmPhy1 and ZmPhy2 includes amino acid residues 170-202 and residues R178, 11719, and R182. The residues that interact with the substrate are underligned.

[0167] E. coli-Derived Phytase Expression Vectors

TABLE 3
Expression Cassettes in Constructs for Expression in Seed

| Expres- | SEQ | | | | C- | |
|---|---|---|---|---|---|---|
| sion | ID | Promo- | Signal | Coding | terminal | Termi- |
| cassette* | NO | ter | peptide | sequence | extension | nator |
| pAG4728 | 54 | Maize | Maize | Phy-02 | SEKDEL | NOS |
| | | oleosin | gamma | | (SEQ ID | |
| | | 16 | zein 27 | | NO: 32) | |
| pAG4813 | 55 | Maize | Maize | Phy-02 | HvVSD | NOS |
| | | oleosin | gamma | | | |
| | | 16 | zein 27 | | | |
| pAG4729 | 56 | Maize | Maize | Phy-03 | SEKDEL | NOS |
| | | oleosin | gamma | | (SEQ ID | |
| | | 16 | zein 27 | | NO: 32) | |
| pAG4814 | 57 | Maize | Maize | Phy-03 | HvVSD | NOS |
| | | oleosin | gamma | | | |
| | | 16 | zein 27 | | | |
| pAG4718 | 58 | Maize | Maize | PhyNov9X | SEKDEL | NOS |
| | | oleosin | gamma | | (SEQ ID | |
| | | 16 | zein 27 | | NO: 32) | |
| pAG4263 | 59 | Maize | Maize | Phy-02 | SEKDEL | NOS |
| | | gamma | gamma | | (SEQ ID | |
| | | zein 27 | zein 27 | | NO: 32) | |
| pAG4284 | 61 | Maize | Maize | Phy-02 | HvVSD | NOS |
| | | gamma | gamma | | | |
| | | zein 27 | zein 27 | | | |
| pAG4913 | 62 | Maize | Maize | Phy-02opt | SEKDEL | NOS |
| | | gamma | gamma | | (SEQ ID | |
| | | zein 27 | zein 27 | | NO: 32) | |
| pAG4265 | 63 | Maize | Maize | Phy-03 | SEKDEL | NOS |
| | | gamma | gamma | | (SEQ ID | |
| | | zein 27 | zein 27 | | NO: 32) | |
| pAG4285 | 65 | Maize | Maize | Phy-03 | HvVSD | NOS |
| | | gamma | gamma | | | |
| | | zein 27 | zein 27 | | | |
| pAG4259 | 66 | Maize | Maize | PhyNov9X | SEKDEL | NOS |
| | | gamma | gamma | | (SEQ ID | |
| | | zein 27 | zein 27 | | NO: 32) | |
| pAG4292 | 67 | Maize | Maize | PhyQB | SEKDEL | NOS |
| | | gamma | gamma | | (SEQ ID | |
| | | zein 27 | zein 27 | | NO: 32) | |
| pAG4726 | 68 | Rice | Maize | Phy-02 | SEKDEL | CaMV |
| | | glutelin | gamma | | (SEQ ID | 35s |
| | | 1 | zein 27 | | NO: 32) | |
| pAG4799 | 69 | Rice | Maize | Phy-02 | HvVSD | CaMV |
| | | glutelin | gamma | | | 35s |
| | | 1 | zein 27 | | | |
| pAG4912 | 70 | Rice | Maize | Phy-02opt | SEKDEL | CaMV |
| | | glutelin | gamma | | (SEQ ID | 35s |
| | | 1 | zein 27 | | NO: 32) | |
| pAG4727 | 71 | Rice | Maize | Phy-03 | SEKDEL | CaMV |
| | | glutelin | gamma | | (SEQ ID | 35s |
| | | 1 | zein 27 | | NO: 32) | |
| pAG4801 | 72 | Rice | Maize | Phy-03 | HvVSD | CaMV |
| | | glutelin | gamma | | | 35s |
| | | 1 | zein 27 | | | |
| pAG4717 | 73 | Rice | Maize | PhyNov9X | SEKDEL | CaMV |
| | | glutelin | gamma | | (SEQ ID | 35s |
| | | 1 | zein 27 | | NO: 32) | |
| pAG4802 | 74 | Rice | Maize | PhyNov9X | HvVSD | CaMV |
| | | glutelin | gamma | | | 35s |
| | | 1 | zein 27 | | | |
| pAG4268 | 75 | Rice | Maize | Phy-02 | SEKDEL | NOS |
| | | glutelin | gamma | | (SEQ ID | |
| | | B4 | zein 27 | | NO: 32) | |
| pAG4294 | 76 | Rice | Maize | Phy-02opt | SEKDEL | NOS |
| | | glutelin | gamma | | (SEQ ID | |
| | | B4 | zein 27 | | NO: 32) | |
| pAG4269 | 77 | Rice | Maize | Phy-03 | SEKDEL | NOS |
| | | glutelin | gamma | | (SEQ ID | |
| | | B4 | zein 27 | | NO: 32) | |
| pAG4267 | 78 | Rice | Maize | PhyNov9X | SEKDEL | NOS |
| | | glutelin | gamma | | (SEQ ID | |
| | | B4 | zein 27 | | NO: 32) | |
| pAG4293 | 79 | Rice | Maize | PhyQB | SEKDEL | NOS |
| | | glutelin | gamma | | (SEQ ID | |
| | | B4 | zein 27 | | NO: 32) | |
| pAG4891 | 80 | Rice | Rice | Phy-02 | SEKDEL | NOS |
| | | glutelin | glutelin | | (SEQ ID | |
| | | B4 | B4 | | NO: 32) | |
| pAG4270 | 81 | Rice | Rice | PhyNov9X | SEKDEL | NOS |
| | | glutelin | glutelin | | (SEQ ID | |
| | | B4 | B4 | | NO: 32) | |
| pAG4260 | 142 | Maize | Maize | PhyNov9X | SEKDEL | NOS |
| | | globulin | gamma | | (SEQ ID | |
| | | 1 | zein 27 | | NO: 32) | |
| pAG4264 | 143 | Maize | Maize | Phy-02 | SEKDEL | NOS |
| | | globulin | gamma | | (SEQ ID | |
| | | 1 | zein 27 | | NO: 32) | |
| pAG4266 | 144 | Maize | Maize | Phy-03 | SEKDEL | NOS |
| | | globulin | gamma | | (SEQ ID | |
| | | 1 | zein 27 | | NO: 32) | |

*Expression cassettes are denoted by names of the transformation vectors that contained the cassettes.

TABLE 4
Two Casettes Constructs for Expression in Seed

| | SEQ | | | | | | |
|---|---|---|---|---|---|---|---|
| Expression | ID | Cassette | | Signal | Coding | C-terminal | |
| Cassette* | NO | # | Promoter | peptide | sequence | extension | Terminator |
| pAG4915 | 60 | 1 | Rice | Maize | Phy-02opt | SEKDEL | NOS |
| | | | glutelin 1 | gamma | | (SEQ ID | |
| | | | | zein 27 | | NO: 32) | |
| | | 2 | Rice | Maize | Phy-02opt | SEKDEL | NOS |
| | | | glutelin 1 | gamma | | (SEQ ID | |
| | | | | zein 27 | | NO: 32) | |
| pAG4916 | 64 | 1 | Maize | Maize | Phy-02opt | SEKDEL | NOS |
| | | | gamma | gamma | | (SEQ ID | |
| | | | zein 27 | zein 27 | | NO: 32) | |
| | | 2 | Maize | Maize | Phy-02 | SEKDEL | NOS |
| | | | gamma | gamma | opt | (SEQ ID | |
| | | | zein 27 | zein 27 | | NO: 32) | |
| pAG4815 | 82 | 1 | Rice | Maize | Phy-02 | SEKDEL | NOS |
| | | | glutelin 1 | gamma | | (SEQ ID | |
| | | | | zein 27 | | NO: 32) | |
| | | 2 | Maize | Maize | Phy-02 | HvVSD | NOS |
| | | | oleosin 16 | gamma | | | |
| | | | | zein 27 | | | |
| pAG4281 | 83 | 1 | Maize | Maize | Phy-02 | SEKDEL | NOS |
| | | | gamma | gamma | | (SEQ ID | |
| | | | zein 27 | zein 27 | | NO: 32) | |
| | | 2 | Maize | Maize | Phy-02 | SEKDEL | NOS |
| | | | gamma | gamma | | (SEQ ID | |
| | | | zein 27 | zein 27 | | NO: 32) | |
| pAG4892 | 84 | 1 | Maize | Maize | Phy-02 | SEKDEL | NOS |
| | | | gamma | gamma | | (SEQ ID | |
| | | | zein 27 | zein 27 | | NO: 32) | |
| | | 2 | Rice | Rice | Phy-02 | SEKDEL | NOS |
| | | | glutelin | glutelin | | (SEQ ID | |
| | | | B4 | B4 | | NO: 32) | |
| pAG4803 | 85 | 1 | Rice | Maize | Phy-02 | HvVSD | NOS |
| | | | glutelin 1 | gamma | | | |
| | | | | zein 27 | | | |
| | | 2 | Maize | Maize | Phy-02 | SEKDEL | NOS |
| | | | oleosin 16 | gamma | | (SEQ ID | |
| | | | | zein 27 | | NO: 32) | |
| pAG4816 | 86 | 1 | Rice | Maize | Phy-03 | SEKDEL | NOS |
| | | | glutelin 1 | gamma | | (SEQ ID | |
| | | | | zein 27 | | NO: 32) | |
| | | 2 | Maize | Maize | Phy-03 | HvVSD | NOS |
| | | | oleosin 16 | gamma | | | |
| | | | | zein 27 | | | |
| pAG4282 | 87 | 1 | Maize | Maize | Phy-03 | SEKDEL | NOS |
| | | | gamma | gamma | | (SEQ ID | |
| | | | zein 27 | zein 27 | | NO: 32) | |
| | | 2 | Maize | Maize | Phy-03 | SEKDEL | NOS |
| | | | gamma | gamma | | (SEQ ID | |
| | | | zein 27 | zein 27 | | NO: 32) | |
| pAG4810 | 88 | 1 | Rice | Maize | Phy-03 | HvVSD | NOS |
| | | | glutelin 1 | gamma | | | |
| | | | | zein 27 | | | |
| | | 2 | Maize | Maize | Phy-03 | SEKDEL | NOS |
| | | | oleosin 16 | gamma | | (SEQ ID | |
| | | | | zein 27 | | NO: 32) | |
| pAG4798 | 89 | 1 | Maize | Maize | PhyNov9 | SEKDEL | NOS |
| | | | gamma | gamma | X | (SEQ ID | |
| | | | zein 27 | zein 27 | | NO: 32) | |
| | | 2 | Maize | Maize | PhyNov9 | SEKDEL | NOS |
| | | | oleosin 16 | gamma | X | (SEQ ID | |
| | | | | zein 27 | | NO: 32) | |
| pAG4797 | 90 | 1 | Rice | Maize | PhyNov9 | SEKDEL | Ca |
| | | | glutelin 1 | gamma | X | (SEQ ID | MV |
| | | | | zein 27 | | NO: 32) | 35s |
| | | 2 | Maize | Maize | PhyNov9 | SEKDEL | NOS |
| | | | oleosin 16 | gamma | X | (SEQ ID | |
| | | | | zein 27 | | NO: 32) | |
| pAG4279 | 145 | 1 | Maize | Maize | Phy-02 | SEKDEL | NOS |
| | | | gamma | gamma | | (SEQ ID | |
| | | | zein 27 | zein 27 | | NO: 32) | |
| | | 2 | Maize | Maize | Phy-02 | SEKDEL | NOS |
| | | | globulin 1 | gamma | | (SEQ ID | |
| | | | | zein 27 | | NO: 32) | |
| pAG4811 | 146 | 1 | Rice | Maize | Phy-02 | HvVSD | NOS |
| | | | glutelin 1 | gamma | | | |
| | | | | zein 27 | | | |
| | | 2 | Maize | Maize | Phy-02 | SEKDEL | NOS |
| | | | globulin 1 | gamma | | (SEQ ID | |
| | | | | zein 27 | | NO: 32) | |
| pAG4280 | 147 | 1 | Maize | Maize | Phy-03 | SEKDEL | NOS |
| | | | gamma | gamma | | (SEQ ID | |
| | | | zein 27 | zein 27 | | NO: 32) | |
| | | 2 | Maize | Maize | Phy-03 | SEKDEL | NOS |
| | | | globulin 1 | gamma | | (SEQ ID | |
| | | | | zein 27 | | NO: 32) | |
| pAG4812 | 148 | 1 | Rice | Maize | Phy-03 | HvVSD | NOS |
| | | | glutelin 1 | gamma | | | |
| | | | | zein 27 | | | |
| | | 2 | Maize | Maize | Phy-03 | SEKDEL | NOS |
| | | | globulin 1 | gamma | | (SEQ ID | |
| | | | | zein 27 | | NO: 32) | |
| pAG4295 | 181 | 1 | Rice | Maize | Phy-02opt | SEKDEL | NOS |
| | | | glutelin | gamma | | (SEQ ID | |
| | | | B4 | zein 27 | | NO: 32) | |
| | | 2 | Rice | Maize | Phy-02opt | SEKDEL | NOS |
| | | | glutelin | gamma | | (SEQ ID | |
| | | | B4 | zein 27 | | NO: 32) | |

*Expression cassettes are denoted by names of the transformation vectors that contained the cassettes.

TABLE 5
Three Cassette Constructs for Expression in Seed

| | SEQ | | | | | | |
|---|---|---|---|---|---|---|---|
| Expression | ID | Cassette | | Signal | Coding | C-terminal | |
| Cassette* | NO | # | Promoter | peptide | sequence | extension | Terminator |
| pAG4821 | 91 | 1 | Maize | Maize | Phy-02 | SEKDEL | NOS |
| | | | gamma | gamma | | (SEQ ID | |
| | | | zein 27 | zein 27 | | NO: 32) | |
| | | 2 | Rice | Maize | Phy-02 | HvVSD | NOS |
| | | | glutelin 1 | gamma | | | |
| | | | | zein 27 | | | |
| | | 3 | Maize | Maize | Phy-02 | SEKDEL | NOS |
| | | | oleosin 16 | gamma | | (SEQ ID | |
| | | | | zein 27 | | NO: 32) | |
| pAG4822 | 92 | 1 | Maize | Maize | Phy-03 | SEKDEL | NOS |
| | | | gamma | gamma | | (SEQ ID | |
| | | | zein 27 | zein 27 | | NO: 32) | |
| | | 2 | Rice | Maize | Phy-03 | HvVSD | NOS |
| | | | glutelin 1 | gamma | | | |
| | | | | zein 27 | | | |
| | | 3 | Maize | Maize | Phy-03 | SEKDEL | NOS |
| | | | oleosin 16 | gamma | | (SEQ ID | |
| | | | | zein 27 | | NO: 32) | |
| pAG4758 | 149 | 1 | Rice | Maize | Phy-02 | SEKDEL | NOS |
| | | | glutelin 1 | gamma | | (SEQ ID | |
| | | | | zein 27 | | NO: 32) | |
| | | 2 | Maize | Maize | Phy-02 | SEKDEL | NOS |
| | | | gamma | gamma | | (SEQ ID | |
| | | | zein 27 | zein 27 | | NO: 32) | |
| | | 3 | Maize | Maize | Phy-02 | SEKDEL | NOS |
| | | | globulin 1 | gamma | | (SEQ ID | |
| | | | | zein 27 | | NO: 32) | |

TABLE 6
Expression Cassettes for Expression of E. coli-derived
Phytases in Other Tissues, Including Leaves

| Expres- | SEQ | | | | C- | |
|---|---|---|---|---|---|---|
| sion | ID | Promo- | Signal | Coding | terminal | Termi- |
| Cassette* | NO | ter | peptide | sequence | extension | nator |
| pAG4871 | 93 | Maize | Maize | Phy-02 | SEKDEL | NOS |
| | | ubiqui- | gamma | | (SEQ ID | |
| | | tin 1 | zein 27 | | NO: 32) | |
| pAG4868 | 94 | Maize | Maize | Phy-02 | SEKDEL | NOS |
| | | PEP | gamma | | (SEQ ID | |
| | | carbox- | zein 27 | | NO: 32) | |
| | | ylase | | | | |
| pAG4872 | 95 | Maize | Maize | Phy-03 | SEKDEL | NOS |
| | | ubiqui- | gamma | | (SEQ ID | |
| | | tin 1 | zein 27 | | NO: 32) | |
| pAG4869 | 96 | Maize | Maize | Phy-03 | SEKDEL | NOS |
| | | PEP | gamma | | (SEQ ID | |
| | | carbox- | zein 27 | | NO: 32) | |
| | | ylase | | | | |
| pAG4870 | 97 | Maize | Maize | PhyNov9X | SEKDEL | NOS |
| | | ubiqui- | gamma | | (SEQ ID | |
| | | tin 1 | zein 27 | | NO: 32) | |
| pAG4867 | 98 | Maize | Maize | PhyNov9X | SEKDEL | NOS |
| | | PEP | gamma | | (SEQ ID | |
| | | carbox- | zein 27 | | NO: 32) | |
| | | ylase | | | | |

*Expression cassettes are denoted by names of the transformation vectors that contained the cassettes.

[0168] In comparing the E. coli phytases Nox9X, Phy02, Phy03, and QB, the standard conserved RHGXRXP (SEQ ID NO: 185) motif incorporates residues 16-22 of the wild-type sequence and is conserved amongst these molecules. In addition to these conserved residues, there are nine other residues that interact with the substrate, which are common among these enzymes, except for Q253, which is valine in QB only. The conserved region in E. coli phytases extends from amino acid residues 16 to 306 and include residues R16, H17, G18, R20, P22, T23, K24, D88, R92, S212, S215, M216, Q253 (which is V in QB), R267, H303, D304, and T305. There are also four disulfide bonds in the wild-type enzyme: C178-C188, C77-C108, C382-C392, and C133-C408. All of these cysteines are conserved except for C178 and C188 in Phy02. Nov9X also has cysteines in positions 76 and 205 (75 and 204 using wild-type numbering), but they are at opposite ends of the crystal structure so they aren't likely to form a disulfide. The 178-188 disulfide holds the ends of two helices together at one end of the molecule.

[0169] Sequences of Preferred Expression Constructs.

[0170] FIG. 1 illustrates tandem expression cassettes for Phy02 in vector pAG4281 (SEQ ID NO: 37). Each one of the expression cassettes includes ZmZ27P, promoter from the maize gamma zein Z27 gene; Z27ss, signal peptide from maize gamma zein 27; Phy-02, coding sequence for phytase Phy-02; SEKDEL (SEQ ID NO: 32), hexapeptide C-terminal signal sequence for retention in the endoplasmic reticulum; NOS, nopaline synthase polyadenylation sequence.

### Example 2. Expression of Phytase in Transgenic Plants

[0171] Independently transgenic or, in the case of maize plants made with additional plant-derived phytase molecules, cisgenic, maize plants that had been transformed with vectors, or had expression cassettes directly introduced using various genome editing technologies (including meganucleases, zinc finger proteases, the CRISPR-Cas system, or related systems), as described above were grown to maturity, and cross-pollinated with wild-type (untransformed) maize plants. Approximately 20 seed were harvested from each of these plants. Seed was milled through a 0.5 mm screen to produce a fine powder. Enzyme was then extracted and assayed for phytase activity as described below.

[0172] Phytase Assay from Seed.

[0173] Enzyme extracts were prepared by incubating 15 mg milled seed flour for 1 hour at room temperature in 1.5 ml of 25 mM sodium borate, pH 10, 0.01% Tween 20. Extracts were then diluted 100-fold in an assay buffer (250 mM sodium acetate, pH 5.5, 1 mM calcium chloride, 0.01% Tween 20). Seventy five microliters of the diluted extracts or 75 ml of buffer-only controls were dispensed into individual wells of a round-bottom 96-well plate. One hundred fifty microliters of freshly-prepared phytic acid (9.1 mM dodecasodium salt from Biosynth International, Staad, Switzerland, prepared in assay buffer) were added to each well. Plates were sealed and incubated for 60 min at 37° C. One hundred fifty microliters of the stop solution (20 mM ammonium molybdate, 5 mM ammonium vanadate, 4% nitric acid) was added to each well, mixed thoroughly via pipetting, and allowed to incubate at room temperature for 10 minutes. Plates were centrifuged at 3000×G for 10 minutes, and 100 μL of the clarified supernatants were transferred to the wells of a flat-bottom 96-well plate. Absorbance at 415 nm from each sample was compared to that of negative controls (buffer-only, no enzyme) and potassium phosphate standards. The standard curve was prepared by mixing 50 μl of potassium phosphate standards (0-1.44 mM, prepared in assay buffer) with 100 μL of freshly-prepared phytic acid, followed by 100 mL of stop solution.

[0174] Phytase activity varied significantly in seed from independent transgenic plants, as expected. Seed were harvested from the initial transformants (T0) that had been systematically generated with the construct pAG4758 that includes three expression cassettes: OsGlu1:mZ27:Phy-02:SEKDEL mZein:mZ27:Phy-02:SEKDEL, and Glb1:mZ27:Phy-02:SEKDEL.

[0175] Seed were then tested for expression of the transgenes via phytase enzyme assays. Activities observed among 83 transformants varied with the highest expressors having activities up to 2976 FTU/g. Furthermore, segregation analysis among seed derived from these events determined that some of the highest expressing events carried T-DNAs inserted into multiple chromosomes. Based on these observations, two of the events were selected for further propagation. The hemizygous phytase activity that was measured in these two events is shown in Table 7.

TABLE 7
Phytase Activity as Measured in Seed Harvested From
Initial Transformants (T0) of Two Lead Events

| Event | FTU/g |
|---|---|
| 4758_15* | 1523 ± 79 |
| 4758_203** | 2601 ± 144 |

*4758_15 corresponds to event PY15
**4758_203 corresponds to event PY203

[0176] FIG. 2 illustrates the range of Nov9X activity that was observed among transgenic plants that had been generated with the expression vectors pAG4270 and pAG4798. Referring to FIG. 2, the phytase activity was detectable in grain from independently-transformed transgenic maize plants expressing Nov9X. Plant IDs are arbitrary numerical tags assigned to individual plants for the purpose of tracking the corresponding plants and their progeny.

[0177] Seed was similarly harvested from multiple, independently-generated transgenic plants that expressed Phy03. Examples of Phy03 expression that was observed in these seed are shown in FIG. 3. FIG. 3 illustrates examples of phytase expression levels detected in seed when Phy03 expression is driven by one of three different promoters. In FIG. 3, Glut1 refers to rice glutelin 1 promoter (SEQ ID NO: 5); Glut4 refers to rice glutelin B4 promoter (SEQ ID NO: 6); and Zein refers to maize gamma zein 27 promoter (SEQ ID NO: 4). Each bar corresponds to the phytase activity that was detected in the pooled seed from a single transgenic plant. In some cases, the phytase activity that was measured was below detectable limits.

[0178] These plants had been transformed with the following expression vectors: pAG4727, carrying the Rice glutelin 1 promoter; pAG4269, carrying the Rice glutelin B4 promoter; and pAG4265, carrying the Maize gamma zein 27 promoter. In this plot, the effectiveness of the three different promoters can be compared. A greater percentage of plants with relatively high levels of expression were recovered among plants that had been transformed with pAG4269, which incorporates the rice glutelin B4 promoter. Similarly, a greater percentage of plants with intermediate or high levels of Phy03 activity were recovered among plants that had been transformed with vectors pAG4727 and pAG4265, which incorporate the rice glutelin 1 and maize gamma zein 27 promoters, respectively.

### Example 3. Genetic Characterization of Preferred Transgenic Plants

[0179] Transgenic maize plants were selected for further characterization.

[0180] Two plants had been generated via transformation with the vector pAG4758 having three expression cassettes: mZein:mZ27:Phy-02:SEKDEL, Glb1:mZ27:Phy-02:SEKDEL, Glu1:mZ27:Phy-02:SEKDEL. These events were identified as PY203 and PY15. Genomic DNA was isolated from each of these plants and subjected to sequence analysis.

[0181] PY15:

[0182] Genetic and sequence analysis of this insertion event revealed that three partial (truncated) T-DNAs are inserted into a single locus in the maize genome. The PY15 insertion (32132 nucleotides [nts]) and its flanking genomic DNA (6407 nts) were isolated using PCR-based approaches. The PY15 insertion contains three partial T-DNA repeats from the construct pAG4758 adjacent to one another and is inserted into maize chromosome 5.

[0183] Analysis of the genomic flanks maps the PY15 insertion at a non-genic region of maize chromosome 5. The nearest predicted maize gene is more than 20 kb from the T-DNA insertion site.

[0184] Genomic DNA near the T-DNA left border and right border was named left flank (LF) and right flank (RF), respectively. A single HindIII fragment of 6435 nts from the B line maize genomic DNA contains both the LF and RF. LF has 2915 nts (SEQ ID NO: 44) and RF has 3492 nts (SEQ ID NO: 45). A GenBank database search using both LF and RF sequences hit multiple targets from B73 maize chromosome 5, which serves as the reference genome.

[0185] The total length of maize B73 chromosome 5 is 217928451 bp (B73 RefGen_v3, sequence ID: NC 024463.1). In chromosome 5, the T-DNA appears to be inserted in the region of the maize genome that includes the sequence of SEQ ID NO: 41 (chromosome 5 excerpt (B line PY_15 locus sequence). The PY_15 locus misses 28 nucleotides ATGGGGAAAGTCGCCCCGCCGATAGCGA (SEQ ID NO: 150) located between nucleotides 2915 and 2944 of SEQ ID NO: 41.

[0186] The right most nucleotide of the LF of SEQ ID NO: 41 corresponds to position 186821053 and the left most nucleotide of the RF of SEQ ID NO: 41 corresponds to position 186821082 of the annotated maize B73 chromosome 5. The 28 nucleotides gap between the LF and RF is missing in PY15 but present in both B and B73 maize lines, suggesting that the PY15 T-DNA insertion creates a 28 nucleotide deletion in the maize genome at the insertion site. The PY15 insertion and the 28 nucleotide deletion caused by this insertion are believed to have no impact on maize genes, because there is no experimental or hypothetical gene at the insertion site.

[0187] The sequence of the PY15 locus from the maize (SEQ ID NO: 125) is a 38539 nucleotide sequence that includes the LF border (1-2915 nts), T-DNA and RF border (35048-38539 nts) sequences. T-DNA sequences is a 32412 nucleotides sequence (SEQ ID NO: 151) located between nucleotides in positions 2915 and 35048 in SEQ ID NO: 125.

[0188] PY203:

[0189] An analysis of the T-DNA in PY203 revealed the presence of two separate insertion sites. One T-DNA is inserted into chromosome 8 (“Locus 3293”) and a second T-DNA is inserted into chromosome 2 (“Locus 3507”). Locus 3293 contains a single T-DNA. Locus 3507 contains a single, truncated T-DNA, which includes only 2 of the three phytase expression cassettes. In Locus 3293, the inserted sequence begins in the region that corresponds to the Right Border sequence of the T-DNA, through the three expression cassettes for Phy02, through the expression cassette for the PMI selectable marker, and to the Left Border sequence of the T-DNA from the vector. In Locus 3507, the inserted sequence (“GTGTGAGGCGC” (SEQ ID NO: 38)) begins in the region that corresponds to the Right Border sequence and continues through to nucleotides of the vector and has nucleotide coordinates 10530-10540 8144. The host sequences flanking the insertions in both chromosome 8 (“Locus 3293”) and chromosome 2 (“Locus 3507”) appear to be intact.

[0190] In chromosome 8, the T-DNA appears to be inserted in the region of the maize genome that includes the sequence of SEQ ID NO: 39 (Chromosome 8 excerpt).

[0191] In chromosome 2, the partial T-DNA appears to be inserted in the region of the maize genome that includes the sequence of SEQ ID NO: 40 (Chromosome 2 excerpt).

[0192] Sequence Characterization of T-DNA Insertion Loci 3293 and 3507 in the Maize Transgenic Event PY203

[0193] Locus 3293:

[0194] Using a combination of genome walking and various PCR amplification strategies, the entire locus 3293 in the event PY203 has been isolated and sequence characterized together with the flanking maize genomic DNA sequences isolated from both sides of the T-DNA insertion. The final 3293 locus sequence of 18621 bp (SEQ ID NO: 42) contains single and intact copy of the T-DNA (SEQ ID NO: 152) of the pAG4758 construct with the nucleotide coordinates 17223-11173 of the vector. There are no integrated vector backbone sequences in PY203. At its right border side the T-DNA is flanked by 1812 bp of the maize genomic DNA (1-1812 nts of SEQ ID NO: 42) that is according to the BLASTN results against publicly available B73 maize genome sequence database has 100% identity a sequence on the maize chromosome 8 (nucleotide position: 89933570-89935378) (Lawrence et al., 2004, Nucleic Acids Research 32: D393-D397, which is incorporated herein by reference as if fully set forth). This genomic region does not have any currently annotated genes or genetic elements. Furthermore, the T-DNA insertion in locus 3293 of the event PY203 did not create any new open reading frames that would span the junction between the isolated 1812 bp maize genomic DNA and the 5′ end of the inserted vector T-DNA.

[0195] At its left border side, a 1662 bp maize genomic DNA (16960-18621 of SEQ ID NO: 42) was identified, which is attached to the processed left T-DNA border sequence at the nucleotide position 11173 in the vector. The 1662 bp maize genomic DNA sequence was identified on the maize chromosome 8 (nucleotide position: 89935403-89937064).

[0196] The integrated locus 3293 contains an intact copy of the T-DNA (15147 nts; SEQ ID NO: 152) of the transformation vector, which has displaced 24 nucleotides of the original maize genomic DNA sequence on the maize chromosome 2. The T-DNA sequence is located in the sequence of SEQ ID NO: 42 between nucleotides 1812 and 16960.

[0197] Locus 3507:

[0198] Similarly to the work performed on the locus 3293, genome walking and various PCR amplification approaches led to isolation and sequence characterization of the entire locus 3507 in the event PY203, including flanking maize genomic DNA sequences at the both ends of the T-DNA. The locus 3507 specific sequence of 13109 bp (SEQ ID NO: 43) contains single, but truncated at its 3′ end T-DNA copy. There are no integrated vector backbone sequences at this T-DNA integration site.

[0199] The 2101 bp maize genomic DNA flank (nts 1-2101 of SEQ ID NO: 43) identified at the 5′ end of the T-DNA (right border side) in the locus 3507 has 100% sequence identity to the nucleotides 141216135-141214035 of the maize chromosome 2 in B73 maize genome sequence database. A 2569 bp maize genomic DNA (nts 10543-13110 of SEQ ID NO: 43) was identified that is attached to the truncated 3′ end of the T-DNA and has 99.96% sequence identity to nucleotides 141213994-141211426 of the maize chromosome 2 in the B73 genome.

[0200] Thus, T-DNA of the vector (8439 nts; SEQ ID NO: 153) that is integrated into locus 3507 has displaced 40 nucleotides of the original maize genomic DNA sequence on maize chromosome 2. The T-DNA sequence is located between nts 2101 and 10541 of SEQ ID NO: 43. There are no annotated genes in the vicinity of the T-DNA insertion at the locus 3507 according to information on publicly available maize genome sequence reference B73.

[0201] Sequence Characterization of T-DNA Insertion Locus in the Transgenic Maize Event PY53 (4281_53)

[0202] Event PY53 had been generated via transformation with the vector pAG4281 that includes two expression cassettes: ZmGammaZein27: ZmGammaZein27:Phy-02:SEKDEL:NOS and ZmGammaZein27:ZmGammaZein27: Phy-02:SEKDEL:NOS.

[0203] Using a combination of genome walking and various PCR-based amplification strategies, the entire PY53 locus sequence in the event 4281_53 has been isolated as a series of overlapping PCR or restriction fragments. The fragments were cloned and multiple individual clones were completely sequenced in both directions, including the flanking maize genomic DNA sequences isolated at both ends of the T-DNA insertion. It was determined that the 41,344 bp PY53 locus sequence (SEQ ID NO: 175) contains three complete copies of T-DNA, which originates from the vector pAG4281, as well as one partial T-DNA copy that lacks the PMI marker gene expression cassette.

[0204] The genetic organization of the PY53 locus is arranged with T-DNAs being either tandem or inverted repeats. The locus contains eight intact and potentially fully functional Phy02 expression units. There were no integrated vector backbone sequences detected at this T-DNA integration site or in the maize genome of the 4281_53 transgenic event. No known annotated gene sequences in the proximity of T-DNA insertion site in the PY53 locus were found based on analysis of the publicly available reference sequence of the B73 maize genome (Maize B73 RefGen_v4). The insertion of the pAG4281 T-DNAs into the maize genome of the event 4281_53 has displaced 34 nucleotides of the original wild type maize genomic DNA on the maize chromosome 6 and has occurred between nucleotides with coordinates 142266564-142266598.

[0205] On the right border side, the PY53 locus is flanked by the isolated and sequence characterized 4,222 bp of the maize genomic DNA flanking sequence. This DNA maps with 100% sequence identity to a sequence on the maize chromosome 6 (nucleotide position: 142266564-142262343).

[0206] On the left border side, the locus PY53 is flanked by the isolated and sequence characterized 1,948 bp of the maize genomic DNA that, according to the BLASTN results against publicly available B73 maize genome sequence database (Maize B73 RefGen_v4), has 100% identity to a sequence on the maize chromosome 6 (nucleotide position: 142268545-142266598). It appears that this maize genomic region does not have any annotated genes or known genetic elements. At the left T-DNA border site of the locus PY53, the T-DNA insertion did not create any new open reading frames that would span the junction between the isolated 1,948 bp maize genomic DNA left border flank and the 3′ end of the inserted pAG4281 T-DNA.

[0207] PY209:

[0208] Genetic and sequence analysis of this insertion event revealed that a single 9,968 bp T-DNA sequence (SEQ ID NO: 155) from pAG4295 vector (nucleotides 12756-6696) is inserted into a single locus in the maize genome on chromosome 4. The PY209 insertion and its flanking genomic DNA were isolated using PCR-based approaches. Genomic DNA near the T-DNA left border and right border was named left flank (LF) and right flank (RF), respectively. The PY209 locus is a 13592 nucleotides sequence of SEQ ID NO: 154 and includes RF, T-DNA and LF sequences. The T-DNA sequence is located between nucleotides 1848 and 11817 of SEQ ID NO: 154.

[0209] RF includes 1,848 bp maize genomic DNA (nts 1-1,848 of SEQ ID NO: 154) that side with the nucleotide coordinates 227649299-227648250 on the chromosome 4, and LF includes 1,776 bp maize genomic DNA (11817-13592 nts of SEQ ID NO: 154) that side with the nucleotide coordinates 227648225-227646448.

[0210] PY1053:

[0211] (4915_1053) Genetic and sequence analysis of this insertion event identified right border flank (2314 nts; SEQ ID NO: 156) and left border flank (2248 nts; SEQ ID NO: 157) sequences. RB flank includes 1,802 nucleotides of maize genomic DNA and a portion of T-DNA (nucleotides 1804-2314 of SEQ ID NO: 156).

[0212] LB flank includes a portion of T-DNA sequence (1-505 nucleotides of SEQ ID NO: 157), and 1,742 nucleotides of maize genomic DNA (506-2248 nts of SEQ ID NO: 157).

[0213] PY1203 (4916_1203):

[0214] Genetic and sequence analysis of this insertion event identified right border flank (2314 nts; SEQ ID NO: 158) and left border flank (2252 nts; SEQ ID NO: 159) sequences.

[0215] RB flank includes 1,868 nucleotides of maize genomic DNA and a portion of T-DNA (nucleotides 1869-2314 of SEQ ID NO: 158).

[0216] LB flank includes a portion of T-DNA sequence (1-494 nucleotides of SEQ ID NO: 159), and 1,758 nucleotides of maize genomic DNA (495-2252 nts of SEQ ID NO: 159) from chromosome 10 (130103639-130101882). Based on the flanking sequence information, these events are expected to carry at least two T-DNAs, which have integrated into maize genome with a head-to-head orientation pattern.

### Example 4. Properties of the Phytases

[0217] pH Optimum of the Phytases.

[0218] Enzymes were extracted from cultures of E. coli that expressed either recombinant Phy02, Phy03 or Nov9X phytase. 10 nM dilutions of these enzymes were then assayed as described above, except that the assay buffer was switched from 250 mM sodium acetate, to an alternative “CCH polybuffer,” which pH could be adjusted to several different values. A 10× stock of the CCH polybuffer containing 222 mM anhydrous citric acid, 333 mM HEPES, and 444 mM CHES was prepared. Stocks were then diluted and their pH adjusted with sodium hydroxide, as needed, to obtain 1× stocks at various pH. These 1× stocks were then used in place of the sodium acetate assay buffer in the phytase assay, and the detectable activity recorded as the absorbance at 415 nm. FIG. 4 illustrates pH optima of phytases. As shown in 4, each of the phytases tested had a pH optimum near pH 6.

[0219] Enzyme Kinetics.

[0220] Determination of kinetic properties of the phytases, based upon the estimation of inorganic phosphate released on hydrolysis of phytic acid, was performed following the method described by Engelen et al. (Engelen et al., 2001) with modifications. Phytase at a final concentration of 1 nM was incubated in a microplate with various concentrations of phytic acid in 250 mM sodium acetate, 1 mM calcium chloride, and 0.01% (v/v) Tween-20, pH 5.5 in a total volume of 150 μL. After incubation for 30 minutes at 37° C., reactions were stopped by adding 100 μL of a color-stop reagent consisting of 2.5% (w/v) ammonium molybdate, 0.059% (w/v) ammonium vanadate, and 5.8% (v/v) nitric acid (made fresh from stock solutions of each component). The samples were allowed to sit at room temperature for 10 minutes, followed by centrifugation at 3000×g for 10 minutes. Aliquots of 100 μL supernatant were transferred to a microplate, and phosphate release was measured against a set of phosphate standards spectrophotometrically at 415 nm. Data was fit to the Michaelis-Menton equation using Microsoft Excel. Nov9X, Phy02 and Phy03 were purified from recombinant E. coli. Commercial phytase (CP) was purified from commercially available samples. SDS-PAGE gel revealed two predominant species in CP, which differed slightly in their apparent molecular weights. Each of these species (the “upper band” and the “lower band”) was purified and assayed separately. The kinetic properties of the phytases are shown in Table 8.

TABLE 8
Enzyme Kinetics

| | | | | CP | CP |
|---|---|---|---|---|---|
| | | | | (upper | (lower |
| | Nov9X | Phy02 | Phy03 | band) | band) |
| k_{cat} | 767 | 549 | 642 | 261 | 244 |
| (turnover/s) | | | | | |
| k_{M} (mM) | 0.789 | 0.515 | 0.680 | 0.494 | 0.357 |
| k_{cat}/k_{M} | 972 | 1065 | 944 | 529 | 683 |
| χ² | 11834 | 9617 | 6785 | 192 | 402 |

[0221] Gastric Stability of Enzymes.

[0222] Gastric lability of a recombinant protein is one factor that the United States Department of Agriculture considers when contemplating to permit broad acre propagation of crops that produce that protein. To determine how each enzyme might persist in the digestive tract, specifically as it passes through the stomach, enzymes were purified and subjected to a standardized assay for sensitivity to simulated gastric fluid (Thomas et al., 2004). FIG. 5 illustrates gastric stability of modified phytases. Referring to this figure, lane 1 shows Benchmark molecular weight marker; lane 2 shows Nov 9x (10 min, with pepsin); lane 3 shows Nov 9x (0 min, with inactivated pepsin); lane 4 shows Nov 9x (no pepsin); lane 5 shows Phy02 (10 min, with pepsin); lane 6 shows Phy02 (0 min, with inactivated pepsin); lane 7 shows Phy02 (no pepsin); lane 8 shows Phy03 (10 min, with pepsin); lane 9 shows Phy03 (0 min, with inactivated pepsin); lane 10 shows Phy03 (no pepsin); lane 11 shows D (pepsin only); and lane 12 shows Benchmark molecular weight marker. Referring to FIG. 5, it was observed that whereas Nov9X was relatively stable in the presence of simulated gastric fluid (lane 2), both Phy02 and Phy03 are readily digested by pepsin (lanes 5 and 8, respectively).

[0223] FIG. 6 illustrates gastric stability of commercial phytase (CP). The amount of pepsin and the incubation time in the digestion assay were varied to determine whether the enzyme might be susceptible under more stringent conditions. Referring to FIG. 6, lane 1 shows BenchMark molecular weight marker; lane 2 shows CP (1 h, 1× pepsin); lane 3 shows CP (2 h, 1× pepsin); lane 4 shows CP (3 h, 1× pepsin); lane 5 shows CP (1 h, 2× pepsin); lane 6 shows CP (2 h, 2× pepsin); lane 7 shows CP (3 h, 2× pepsin); lane 8 shows CP (1 h, 4× pepsin); lane 9 shows CP (2 h, 4× pepsin); lane 10 shows CP (3 h, 4× pepsin); lane 11 shows CP (30 min, 8× pepsin); lane 12 shows CP (1 h, 8× pepsin); lane 13 shows CP (3 h, 8× pepsin); lane 14 shows CP (0 min, 8× inactivated pepsin); lane 15 shows CP (2 h, 8× pepsin); lane 16 shows CP (no pepsin); and lane 17 shows (lx pepsin only).

[0224] In contrast to modified phytases shown in FIG. 5, phytase that was purified from a commercial available sample (commercial phytase; as shown in FIG. 6) was stable in synthetic gastric fluid. Increasing the amount of pepsin in the synthetic gastric to 8-fold higher concentrations than are typically used in the assay and increasing the incubation time of the enzyme from 10 minutes to 3 hours failed to digest the enzyme.

[0225] Thermal stability of enzymes. Phytases were extracted from microbial sources (Phy02, Nov9X, Phy03), transgenic seed (Phy02) or a commercially available product, diluted to a common enzyme concentration (5 nM) in assay buffer, and incubated for 90 seconds at various temperatures. Subsequently, the residual enzyme activity was assayed for phytase activity at 37° C., as described above. FIG. 7 illustrates thermal stability of modified phytases. Referring to this figure, Nov9X, Phy02, and Phy03 were purified from recombinant E. coli expression hosts. Grain Phy02 was purified from transgenic corn grain. Commercial phytase was purified from a commercially available sample (AB Vista). Both Phy02 and Phy03 had improved thermal stability relative to Nov9X.

[0226] Thermal Stability of Phytases in Animal Diets Under Pelleting Conditions.

[0227] Phytases were formulated into corn-soy diets at approximately 3000 FTU/kg. Phy02, Phy03 and Nov9X were provided as grain from transgenic corn, milled to particle sizes of approximately 0.5 mm. Three commercially available enzymes were also incorporated into similar diets at rates of 3000 FTU/kg. Diets were then passed through a feed pellet mill with varying conditioning temperatures (60° C. to 90° C.). Following pelleting, feed samples were milled to a particle size of approximately 1 mm, and phytase activity was measured in the milled feed. In each case, the fraction of enzyme activity that survived the pelleting conditions was expressed as a percentage of the enzyme activity that could be detected in the pre-pelleted (mash) feed.

### Example 5. Enzyme Performance in Broilers

[0228] A basal corn-soy diet was prepared with a low content of inorganic phosphate. Replicate diets were prepared from this basal diet by adding a commercially available, microbially produced enzyme (denoted as “Commercial Phytase” in FIG. 8) or milled corn grain expressing Phy02, varying the total amount of enzyme incorporated into each diet. For Phy02, a small amount of corn was omitted from the basal diet to account for the transgenic grain that was being added back to supply the enzyme. Control diets were prepared in which the amount of inorganic phosphate was increased relative to the basal diet. Male broiler chicks were distributed among various feed treatments in pens with about 12 birds per pen, and 6 replicate pens per treatment. The feed was provided in mash form. FIG. 9 illustrates body weights of broilers fed on diets containing grain-expressed phytases. A negative control basal diet containing 0.2% PO4, and a positive control basal diet containing 0.5% PO4, lacking enzyme were used in the study. Diets that contained enzyme were based on the 0.2% PO4 basal diet. Phy02 was added to the diets at a rate of 1000 to 5000 FTU/kg; Commercial Phytase were added to the diets at rates of 2000 to 5000 FTU/kg. After 21 days, birds were weighed and compared to determine the effect of the various enzyme treatments. It was observed that milled grain expressing Phy02 had a dose response in body weight gain that was improved relative to the dose response obtained from the microbially produced, commercial enzyme.

[0229] High Phosphate—High Phytase Broiler Feeding Trial

[0230] Ross male broilers (768 day-old chicks) placed in floor pens with 8 treatments of 6 replicate pens each and 16 chicks per pen. Birds were fed corn, soybean meal, and poultry fat based diets that were pelleted (80-82° C.; crumbled in starter phase) and fed through 45 day of age. FIGS. 9A-9B illustrate animal performance through 45-day within different dietary available phosphorus (aP). FIG. 9A illustrates body weight of the animals. FIG. 9B illustrates feed conversion. Treatments include a positive control with 0.50% available phosphorus (aP) and 1.0% calcium (Ca) for starter, grower, and finisher diets or phytase supplemented diets containing 1500, 3000, 4500 or 6000 FTU/kg phytase with 0.35% aP and 0.85% Ca throughout all growth phases. The reduced aP and Ca diet accounted for the 0.15% uplift of P (and Ca) availability from feeding phytase. Three additional diets were included with 0.30%, 0.40%, and 0.45% aP (0.75%, 0.95% and 1.05% Ca, respectively) within the 4500 FTU/kg phytase level, creating an aP titration (including the 0.35% aP and 0.85% Ca diet mentioned previously). Unlike standard poultry production, the P and Ca levels were not changed (reduced) in any of the treatments through 45 day, resulting in an adequate or overfeeding of P and Ca during the later period. Results show that feeding high levels of phytase with reduced aP and Ca (−0.15%), performed as good or better than a high aP or Ca diet, even with aP and Ca levels above phytase-containing broiler requirements in later periods of production. The birds fed 0.45% aP with 4500 FTU/kg phytase had the overall best performance with 240 g heavier body weight and 9 points (0.9) lower feed conversion than the high phosphate (0.5% aP) treatment.

[0231] Reduced Nutrient—High Phytase Broiler Feeding Trial

[0232] Cobb male broilers (1598 day-old chicks) were placed into floor pens with 9 treatments of 10 or 11 replicate pens each and 17 chicks per pen. Treatment and study design is shown in Table 9 below. Three treatments were fed a commercial type pelleted diet (crumbled in starter phase) with standard amino acid and metabolizable energy level (100% AA/ME). The 100% AA/ME starter, grower, and finisher diets contained 3035, 3100, and 3170 kcal/kg metabolizable energy and 1.18%, 1.05%, and 0.95% digestible lysine, respectively. The remaining 5 treatments had a 3% reduction (97% AA/ME) of energy and lysine (with other amino acids reduced at a similar ratio) during each phase of the 42-day study. Within both the 100% AA/ME and 97% AA/ME groups, there was a positive control (PC) treatment fed standard available phosphorus (aP; 0.45%, 0.40%, and 0.38% during starter, grower, and finisher, respectively) and calcium (Ca; 0.95%, 0.85%, and 0.80% during starter, grower, and finisher, respectively). There was also a negative control (NC) treatment fed 0.15% less aP and 0.12% less Ca. Phytase was added to the NC at either 1000 FTU/kg in the 100% AA/ME group or 500, 1000, 3000, or 6000 FTU/kg in the 97% AA/ME group. Final bird weights and feed consumption were measured on day 41. On day 42, birds from 5 replicate pens per treatment were processed to determine carcass and breast meat yield. Day 41 breast meat weight was calculated by multiplying 42d percent breast meat yield (treatment average) by average bodyweight at day 41 (on a pen basis). Breast meat efficiency (by pen) was then calculated by dividing average bird feed intake by average breast meat weight at day 41.

TABLE 9
Study Design

| | | | | | | No. | |
|---|---|---|---|---|---|---|---|
| | | | | | | Birds | Total No. |
| Trt | Basal | | Phytase | | No. | per | Birds per |
| Group | Diet | Ca/aP | Level | | Pens | Pen | Trt |
| 1 | 100% | PC | 0 | FTU/kg | 11 | 17 | 187 |
| 2 | AA/ME | NC | 0 | FTU/kg | 11 | 17 | 187 |
| 3 | | | 1000 | FTU/kg | 10 | 17 | 170 |
| 4 | 97% | PC | 0 | FTU/kg | 11 | 17 | 187 |
| 5 | AA/ME | NC | 0 | FTU/kg | 11 | 17 | 187 |
| 6 | | | 500 | FTU/kg | 10 | 17 | 170 |
| | | | 7 | | 10 | 17 | 170 |
| 8 | | | 3000 | FTU/kg | 10 | 17 | 170 |
| 9 | | | 6000 | FTU/kg | 10 | 17 | 170 |

[0233] FIG. 10 illustrates bird performance through 28 day of age. FIG. 11 illustrates bird performance through 42 day of age. FIG. 12 illustrates the ratio of intake per breast meat weight through 42 day of age. Letters ABCD in FIGS. 10, 11, and 12 refer to values within variable that are statistically different (P<0.05). Referring to these figures, results of feeding trials for birds through 28 and 42 days of age demonstrated that reducing aP and Ca or combination of aP, Ca, energy and amino acids (in absence of phytase) reduced body weight gain (BWG) and feed conversion (FCR). Within the 100% AA/ME diet, supplementing the negative control (NC) with 1000 FTU/kg phytase brought BWG and FCR back to positive control (PC) levels at 28 and 42 days of age. Addition of 3000 FTU/kg to the NC, 97% AA/ME diet resulted in similar FCR and greater BWG than the PC, 100% AA/ME treatment at 28 days of age. By 42 days of age, 3000 and 6000 FTU/kg addition to NC, 97% AA/ME diet resulted in similar FCR and greater BWG than the NC, 100% AA/ME treatment. Efficiency of breast meat yield was more affected (worse) by the reduced Ca and P than reduced energy and amino acids, with a synergistic response when both were reduced. A similar response was observed with breast meat weight, but the reducing energy and amino acids didn't reduce weight alone. Adding phytase to the NC, 97% AA/ME diet significantly improved breast meat weight (same as PC, 100% AA/ME birds) and breast meat efficiency. Adding 3000 FTU/kg phytase to NC, 97% AA/ME diet had better breast meat efficiency than adding 500 or 1000 FTU/kg to same diet and was equivalent to the PC, 100% AA/ME treatment.

[0234] Adequate and Reduced Nutrients—High Phytase Broiler Feeding Trial

[0235] Ross broilers (3366 male and female day-old chicks) placed into floor pens with 18 treatments of 11 replicate pens each and 17 chicks per pen. Birds were fed industry-type starter (0-14d), grower (15-28d), and finisher (29-49d) corn, soybean meal, & DDGS diets with soy hulls added (up to 4.2%) to reduce energy and amino acids. Three different basal diets were fed (dietary nutrient profiles are shown in Table 10):

[0236] Basal A—standard industry energy and lysine recommendations (other amino acids remained at similar ratio to Lysine, across basal diets);

[0237] Basal B—2, 3, or 5% energy/amino acid reduction during starter, grower, or finisher, respectively;

[0238] Basal C—3, 4, or 6% energy/amino acid reduction during starter, grower, or finisher, respectively

[0239] Within each basal diet 3 different levels of phytase were fed: 0, 1000, or 4500 FTU/kg. Within each enzyme level 2 different calcium (Ca) and available phosphorus (aP) levels were fed: positive control (PC) as shown in Table 10 or negative control (NC; −0.12% Ca and −0.15% aP). Final bird weights and feed consumption were measured on day 49. On days 50 and 51, birds from 4 or 6 replicate pens per treatment (1000 FTU/kg phytase or 0 and 4500 FTU/kg phytase treatments, respectively) were processed to determine carcass and breast meat yield. Day 49 breast meat weight was calculated by multiplying 50/51d percent breast meat yield (treatment average) by average bodyweight at day 49 (on a pen basis). Breast meat efficiency (by pen) was then calculated by dividing average bird feed intake by average breast meat weight at day 49. Same calculation was done for carcass weight and efficiency. FIG. 13 illustrates breast meat efficiency—phytase by Ca/aP interaction. Letters ABCD refer to values that are statistically different (P<0.05). FIG. 14 illustrates breast meat efficiency—phytase by basal diet interaction.

TABLE 10
Formulated Dietary Nutrient Profiles

| | Phase | | | | | | | | |
|---|---|---|---|---|---|---|---|---|---|
| | Starter | | | Grower | | | Finisher | | |
| Basal | A | B | C | A | B | C | A | B | C |
| ME, kcal/lb | 1360 | 1333 | 1319 | 1400 | 1358 | 1344 | 1440 | 1368 | 1354 |
| Crude | 21.00 | 20.58 | 20.37 | 19.00 | 18.43 | 18.24 | 18.00 | 17.10 | 16.07 |
| Protein, % | | | | | | | | | |
| Ca, % | PC = 0.96; NC = 0.84 | | | PC = 0.86; NC = 0.74 | | | PC = 0.80; NC = 0.68 | | |
| aP, % | PC = 0.48; NC = 0.33 | | | PC = 0.43; NC = 0.28 | | | PC = 0.40; NC = 0.25 | | |
| Dig. Lysine, | 1.18 | 1.16 | 1.14 | 1.07 | 1.04 | 1.03 | 0.95 | 0.903 | 0.893 |
| % | | | | | | | | | |
| Dig. | 0.88 | 0.862 | 0.854 | 0.80 | 0.776 | 0.768 | 0.74 | 0.703 | 0.696 |
| Met + Cys, % | | | | | | | | | |
| Dig. | 0.77 | 0.755 | 0.747 | 0.69 | 0.669 | 0.662 | 0.65 | 0.618 | 0.611 |
| Threonine, % | | | | | | | | | |

TABLE 11
Basic Study Design

| | | | Phytase | |
|---|---|---|---|---|
| Group | Basal Diet | Ca/aP | Level | |
| 1 | Basal A | PC | 0 | FTU/kg |
| 2 | | NC | | |
| 3 | | PC | 1000 | FTU/kg |
| 4 | | NC | | |
| 5 | | PC | 4500 | FTU/kg |
| 6 | | NC | | |
| 7 | Basal B | PC | 0 | FTU/kg |
| 8 | | NC | | |
| 9 | | PC | 1000 | FTU/kg |
| 10 | | NC | | |
| 11 | | PC | 4500 | FTU/kg |
| 12 | | NC | | |
| 13 | Basal C | PC | 0 | FTU/kg |
| 14 | | NC | | |
| 15 | | PC | 1000 | FTU/kg |
| 16 | | NC | | |
| 17 | | PC | 4500 | FTU/kg |
| 18 | | NC | | |

[0240] Reducing energy and amino acids resulted in worse feed conversion (FCR) with Basal A being the best and Basal C having the highest FCR (49-day performance, Table 12). Basal B had equivalent 49-day body weight gain as Basal A, with Basal C being the lowest. Basal B had greater 49-day carcass and breast meat weight than Basal A and C, however efficiency of carcass and breast meat yield responded linearly improving as energy and amino acids increased (Table 13). Both phytase levels had significantly better BWG than the birds fed no phytase through 49-day (Table 12), with 4500 FTU/kg being larger than 1000 FTU/kg through 28-day and 42-day. As phytase level increased 49-day FCR and weight and yield efficiency of both carcass and breast meat improved, with 4500 FTU/kg fed birds being better than those fed 1000 FTU/kg (Table 13). There was a phytase by Ca/aP interaction observed in breast meat efficiency, resulting from the improvement from increasing phytase was more noticeable in the standard Ca/aP (PC) as compared to reduced Ca/aP (NC; FIG. 13). A phytase by basal diet interaction was observed in breast meat efficiency, as the response from increasing phytase was most notable in the reduced nutrient diets and 1000 FTU/kg was not different from birds not fed phytase in the Basal A (industry standard) diets.

TABLE 12
Overall 49-day Animal Performance

| | | Body Weight Gain, | |
|---|---|---|---|
| | Intake, kg | kg | Feed Conversion |
| Basal | | | |
| 100% ME-AA | 5.135^{b} | 2.945^{a} | 1.745^{c} |
| 98/97/95% ME-AA | 5.334^{a} | 2.948^{a} | 1.810^{b} |
| 97/96/94% ME-AA | 5.380^{a} | 2.889^{b} | 1.863^{a} |
| Phytase | | | |
| 0 FTU/kg | 5.241 | 2.884^{b} | 1.818^{a} |
| 1000 FTU/kg | 5.288 | 2.931^{a} | 1.805^{b} |
| 4500 FTU/kg | 5.319 | 2.967^{a} | 1.794^{c} |
| Ca-aP | | | |
| PC | 5.270 | 2.917 | 1.807 |
| NC | 5.295 | 2.937 | 1.804 |
| P Values | | | |
| Basal | <0.0001 | 0.014 | <0.0001 |
| Phytase | 0.111 | 0.0015 | <0.0001 |
| Ca—P | 0.41 | 0.30 | 0.27 |
| Basal*Phytase | 0.42 | 0.58 | 0.26 |
| Basal*Ca—P | 0.79 | 0.67 | 0.22 |
| Phytase*Ca—P | 0.77 | 0.76 | 0.93 |
| Basal*Phyt*Ca—P | 0.99 | 0.99 | 0.73 |

^{abc}values within variable with differing letters are statistically different (P < 0.05)

TABLE 13
Breast Meat and Carcass Weight and
Efficiency of Yield Through 49-day

| | | Carcass | Breast | Breast |
|---|---|---|---|---|
| | Carcass | Yield | Meat | Meat |
| | Weight, | Efficiency, | Weight, | Efficiency, |
| | kg | kg:kg | kg | kg:kg |
| Basal | | | | |
| 100% ME-AA | 2.209^{a} | 2.326^{c} | 0.712^{b} | 7.218^{c} |
| 98/97/95% ME- | 2.216^{a} | 2.407^{b} | 0.734^{a} | 7.272^{b} |
| AA | | | | |
| 97/96/94% ME- | 2.160^{b} | 2.491^{a} | 0.718^{b} | 7.492^{a} |
| AA | | | | |
| Phytase | | | | |
| 0 FTU/kg | 2.161^{c} | 2.426^{a} | 0.706^{c} | 7.429^{a} |
| 1000 FTU/kg | 2.194^{b} | 2.411^{b} | 0.721^{b} | 7.333^{b} |
| 4500 FTU/kg | 2.230^{a} | 2.387^{c} | 0.737^{a} | 7.220^{c} |
| Ca-aP | | | | |
| Standard | 2.193 | 2.405 | 0.725^{A} | 7.271^{b} |
| Reduced | 2.197 | 2.412 | 0.717^{B} | 7.384^{a} |
| P Values | | | | |
| Basal | 0.0014 | <0.0001 | 0.0003 | <0.0001 |
| Phytase | 0.0003 | <0.0001 | <0.0001 | <0.0001 |
| Ca-aP | 0.78 | 0.38 | 0.073 | <0.0001 |
| Basal*Phytase | 0.55 | 0.094 | 0.86 | 0.023 |
| Basal*Ca-aP | 0.48 | 0.0024 | 0.57 | 0.38 |
| Phytase*Ca-aP | 0.83 | 0.88 | 0.15 | 0.0001 |
| Basal*Phyt*Ca- | 0.98 | 0.19 | 0.76 | 0.0014 |
| aP | | | | |

^{abc}Values within variable with differing letters are statistically different (P < 0.05)

[0241] Low Phosphate—Very High Phytase Broiler Feeding Trial

[0242] Cobb male broilers (1632 one day-old male chicks) placed into floor pens with 8 treatments of 12 replicate pens each and 17 chicks per pen. Birds were fed a commercial type pelleted diet (crumbled up to 14-day). There was a positive control (PC) treatment with standard phosphate; 0.45% aP and 0.93% Ca in starter (1 through 21-day) and 0.40% aP and 0.84% Ca in grower (21 through 42-day). The negative control (NC) treatment had aP reduced by 0.15% (Ca remained the same). Phytase was added to the NC diet at either 250, 500, 1000, 3000, 6000 or 60000 FTU/kg. On days 21 and 42, 3 birds per pen were euthanized and tibia (to measure ash, mineralization) and ileal digesta samples were taken. Chromic Oxide was included in the diet as an indigestible marker to measure ileal phosphorus digestibility. Through 14, 21, and 42-day birds fed 60,000 FTU/kg phytase had highest body weight gain (BWG), while treatments of 1,000 FTU/kg or more were larger than PC at 42-day (Table 14). The 60,000 FTU/kg birds also had the most bone ash (mineralization), with significantly higher ash weight than the PC group at 42-day (Table 15). The 60,000 FTU/kg phytase group also had numerically the highest ileal phosphorus digestibility (Table 16).

TABLE 14
Overall 42-day Performance

| | Feed Intake, | Body Wt Gain, | Adj. Feed |
|---|---|---|---|
| Treatment | kg | kg | Conversion |
| Positive Control | 4.501^{ab} | 2.889^{bc} | 1.558^{bc} |
| Negative Control | 3.597^{d} | 2.228^{e} | 1.615^{a} |
| 250 U + NC | 4.334^{c} | 2.757^{d} | 1.572^{b} |
| 500 U + NC | 4.372^{bc} | 2.815^{cd} | 1.553^{bc} |
| 1000 U + NC | 4.522^{a} | 2.921^{ab} | 1.548^{c} |
| 3000 U + NC | 4.588^{a} | 2.967^{ab} | 1.546^{c} |
| 6000 U + NC | 4.546^{a} | 2.942^{ab} | 1.546^{c} |
| 60,000 U + NC | 4.617^{a} | 2.988^{a} | 1.545^{c} |
| SEM | 0.033 | 0.022 | 0.005 |
| TRT P Value | <0.0001 | <0.0001 | <0.0001 |
| Block P Value | 0.0045 | 0.0033 | 0.072 |

TABLE 15
Tibia Ash Weight and Percent of Dry Bone

| | |
|---|---|
| 21 d Tibia Ash | 42 d Tibia Ash |

| Treatment | Grams¹ | % | Grams¹ | % |
|---|---|---|---|---|
| Positive | 2.68^{cd} | 27.51^{abc} | 11.44^{bc} | 28.52^{ab} |
| Control | | | | |
| Negative | 1.91^{e} | 22.86^{d} | 8.30^{d} | 25.01^{d} |
| Control | | | | |
| 250 U + NC | 2.61^{d} | 26.07^{c} | 10.78^{c} | 26.55^{c} |
| 500 U + NC | 2.66^{cd} | 26.26^{bc} | 11.15^{bc} | 27.39^{bc} |
| 1000 U + NC | 2.90^{bc} | 27.34^{abc} | 11.70^{ab} | 27.59^{abc} |
| 3000 U + NC | 3.02^{ab} | 27.65^{ab} | 12.01^{ab} | 28.13^{ab} |
| 6000 U + NC | 2.85^{bc} | 27.28^{abc} | 11.99^{ab} | 27.94^{abc} |
| 60,000 U + NC | 3.14^{a} | 27.86^{a} | 12.46^{a} | 28.96^{a} |
| SEM | 0.05 | 0.33 | 0.20 | 0.32 |

^{a-e}Values within columns with no common superscript are statistically different (P < 0.05).
¹Tibia ash weight; n = 3 tibia per pen

TABLE 16
Ileal Digesta Phosphorus (P) Content and P Digestibility

| | 21 d Ileal P | | 42 d Ileal P | |
|---|---|---|---|---|
| | digestibility | 21 d Ileal P | digestibility | 42 d Ileal P |
| Treatment | (%) | (mg/100 g) | (%) | (mg/100 g) |
| Positive | 65.74^{ab} | 37.6^{ab} | 57.67^{ab} | 37.5 |
| Control | | | | |
| Negative | 63.73^{ab} | 36.0^{ab} | 50.05^{b} | 32.6 |
| Control | | | | |
| 250 U + NC | 66.02^{ab} | 28.9^{b} | 51.96^{b} | 30.8 |
| 500 U + NC | 60.29^{b} | 41.8^{a} | 49.64^{b} | 34.9 |
| 1000 U + NC | 63.54^{ab} | 33.1^{ab} | 52.19^{b} | 32.1 |
| 3000 U + NC | 65.20^{ab} | 33.4^{ab} | 55.93^{ab} | 30.0 |
| 6000 U + NC | 66.69^{ab} | 33.7^{ab} | 59.74^{ab} | 28.0 |
| 60,000 U + | 71.07^{a} | 25.6^{b} | 64.66^{a} | 25.7 |
| NC | | | | |
| SEM | 2.25 | 0.003 | 2.39 | 2.8 |

^{ab}Values within columns with no common superscript are statistically different (P < 0.05).

### Example 6. Phytase Expression from the Two T-DNA Inserts in PY203

[0243] As described above, PY203 is a transgenic maize line that experienced T-DNA insertions into two separate chromosomal loci during the initial transformation event. These loci have been labelled Locus 3293 and Locus 3507. The expression cassettes in both loci contribute to the total amount of phytase enzyme that accumulates in seed from these plants. To assess how much of the phytase activity could be attributed to each locus, the two loci were genetically separated, producing seed that carried the T-DNA in Locus 3293, in Locus 3507, or both loci, and then assayed the seed for phytase activity.

[0244] Pollen was taken from the original PY203 transformant, which was hemizygous for the T-DNA at both loci, and used to pollinate the silks of non-transformed maize. Since the two loci are genetically unlinked, each locus would be expected to be inherited independently among the progeny. In other words, among the progeny, the ratio of seed containing no T-DNAs (nulls), to those containing Locus 3293 alone, to those containing Locus 3507 alone, to those containing both recombinant loci was expected to be 1:1:1:1. The resulting seed were harvested at maturity.

[0245] Small shavings were taken from each seed, corresponding to a small amount of endosperm and aleurone tissue. Total DNA was extracted from each sample and tested by PCR for the presence of each recombinant locus. Locus-specific PCR reactions employed a strategy wherein a single primer that was specific to one end of the T-DNA insert was paired with a single primer that was specific to the chromosomal DNA adjacent to that insert. For example, primer 696 (SEQ ID NO: 105) can be paired with primer 516 (SEQ ID NO: 104) to amplify the 186 bp (SEQ ID NO: 128) sequence on the border of T-DNA and maize DNA. More PCR primers unique to event PY203 are listed in Table 18. Thus, unique primer pairs could be prepared for each of the two recombinant loci. Following genotyping of 60 individual seeds via the locus-specific PCR assay, the segregation ratio of (nulls):(Locus 3293):(Locus 3507):(both loci) was found to be 17:13:14:16 (or 1.3:1.0:1.1:1.2, which closely approximates the expected 1:1:1:1), which is consistent with the expectation for two unlinked loci, as described above.

[0246] Each of these seed was then individually ground to a fine powder (flour) and assayed for phytase activity, as described previously. Results of these assays are shown in FIG. 15. This figure illustrates phytase activity that is produced from each of the two independent T-DNA inserts in seed from progeny of PY203. The two loci are genetically unlinked. Where present, each locus was hemizygous in the tested seed. The results indicate that the two loci contribute nearly equal amounts of phytase expression, and that the combined activity from both loci is additive. Null seed, carrying neither locus, had no detectable phytase activity.

### Example 7. Phytase Expression in PY203×PY53 (or PY53×PY 203) Crosses

[0247] Progeny from original “T0” transgenic maize plants were grown and backcrossed or crossed with progeny of “T0” transgenic maize plants from different events. Hybrid ears were made by cross-pollinating transgenic line P203 plants with transgenic line P53 plants, or vice versa. For example, silks on PY203 transgenic plants were pollinated with pollen from individual PY53 transgenic plants (PY203×PY53), or silks on PY53 transgenic plants were pollinated with pollen from PY203 transgenic plants (PY53×PY203). Mature, dried seed were collected from the resulting ears, genotyped, and then individually ground to a fine powder (flour) and assayed for phytase activity, as described previously. It was observed that phytase activity produced from the T-DNA inserts in seed from progeny of PY203 and PY53 was cumulative for each insert. While the homozygous PY203 parent used in the cross had an activity level of 3395+/−173 FTU/g, and the homozygous PY53 parent used in the cross had an activity level of 3754+/−393 FTU/g, the combined homozygous (“stacked”) progeny resulted in an activity level of 8089+/−116 FTU/g. That is, the results indicate that the independent PY53 and PY203 loci contribute nearly equal amounts of phytase expression, and that the combined activity from both loci is additive. Similar results were obtained through crossing of PY15 and PY203, as well as crossing experiments with other events.

[0248] At each generation, some individual ears were self-pollinated. PCR method was applied to select homozygous plants as described in Example 8.

### Example 8. PCR Assays for Identifying and Determining Zygosity of PY15, P53, PY203, PY209, PY1053 and PY1203 Events

[0249] Maize phytase events PY15 and PY203 carry transgenes that result in seed-specific expression of phytase enzyme. PY15 carries multiple T-DNAs at a single genetic locus and PY203 carries two T-DNAs, each at different genetic loci. Molecular identification and tracking of these transgenes can be done using standard (endpoint, gel-based) PCR or real-time PCR. In addition to determining whether a plant is carrying a transgene, these assays can also determine whether a plant is null, hemizygous (carrying one copy of the/each insertion) or homozygous (carrying two copies of the/each insertion).

[0250] FIG. 26 illustrates general multiplex PCR assay design used to determine presence of the T-DNA locus and zygosity. Referring to this figure, A, B, and C with arrows indicate primer binding sites, and rectangular boxes A+B and A+C represent PCR products amplified from respective primer pairs. The multiplex PCR assays include, for each T-DNA locus, one primer (Primer A) that binds to a maize genomic region that is adjacent to where the T-DNA insert is located, one primer (Primer B) that binds to a region in the T-DNA that is close to Primer A, and one primer (Primer C) that binds to a maize genomic region on the other side of the T-DNA and would be close to Primer A if the T-DNA insertion was not present, as in a wild type (WT) locus. When the T-DNA insertion is present, the distance between Primer A and Primer C would be at a significant competitive disadvantage, or too large to amplify a product under the selected PCR amplification conditions and therefore is used to determine zygosity. PCR amplification of product from Primer A+B and Primer A+C would indicate that the T-DNA locus is present and is hemizygous (one-copy). PCR amplification of product from Primer A+B, but not Primer A+C would indicate that the T-DNA locus is present and is homozygous (two-copy). PCR amplification of product from Primer A+C only, would indicate that no T-DNA is present and the plant is WT at this locus.

[0251] DNA Extraction

[0252] These multiplex PCR assays will work with any DNA extraction method that yields DNA that can be amplified with PCR. A standard DNA extraction method (10XTE+Sarkosyl) that was used in this example is as follows: leaf tissue (standard 1 cm hole punch) is sampled into a 96 deep-well block, metal beads are added, and the block is frozen at −80° C. for at least 30 min. The block is then ground for 45 sec in a Kleco Pulverizer, centrifuged at 4,000 RPM for 3 min, the lid is removed, 300 μl of 10XTE+Sarkosyl is added, the block is resealed, and the block is mixed at room temperature for 10-20 min. After incubation, the block is centrifuged at 4,000 RPM for 5 min, 165 μl of upper aqueous phase is removed and added to a 96-well PCR block, the PCR block is sealed, and the block is incubated at 90° C. for 30 min. After incubation, 20 μl of extract is added to 180 μl of sterile water in a 96-well plate (1:10 dilution) to create the final DNA sample for PCR.

[0253] PCR

[0254] PY15 and PY203 standard and real-time PCR primers are listed in Table 17 and standard PCR primer combinations with expected PCR product sizes are listed in Table 18.

TABLE 17
Standard and Real-time (RT) PCR Primers and Probes Used to Determine T-DNA
Locus Presence and Zygosity of PY15 and PY203 Events

| | | Primer | | | | |
|---|---|---|---|---|---|---|
| PCR | | or | Primer/ | Primer Sequence/ | | |
| Assay | Event | Probe | Probe ID | SEQ ID NO | Fluor* | Quencher |
| Standard/ | PY15 | Primer | 580 | CGT TGC ATA GGG | | |
| RT | | | | TTT GGT TTG (SEQ | | |
| | | | | ID NO: 99) | | |
| Standard/ | PY15 | Primer | 688 | TCGACTTGGAGGA | | |
| RT | | | | GGATG (SEQ ID NO: | | |
| | | | | 100) | | |
| Standard/ | PY15 | Primer | 732 | TGGCTAGGACTTGC | | |
| RT | | | | AGTTT (SEQ ID NO: | | |
| | | | | 101) | | |
| RT | PY15 | Probe | PB10 | ATCTCGCCACCTCT | FAM | BHQ1 |
| | | | | TCCACATCAC (SEQ | | |
| | | | | ID NO: 102) | | |
| RT | PY15 | Probe | PB11 | TGTGATGATGTGGT | HEX | BHQ1 |
| | | | | CTGGTTGGGC (SEQ | | |
| | | | | ID NO: 103) | | |
| Standard | PY203 | Primer | 516 | AACGTGACTCCCTT | | |
| | | | | AATTCTCC (SEQ ID | | |
| | | | | NO: 104) | | |
| Standard/ | PY203 | Primer | 696 | CACCAACCTTCTGG | | |
| RT | | | | CATTTG (SEQ ID | | |
| | | | | NO: 105) | | |
| Standard/ | PY203 | Primer | 620 | GATTGCCAAGCTGA | | |
| RT | | | | AACATTTG (SEQ ID | | |
| | | | | NO: 106) | | |
| Standard | PY203 | Primer | 666 | AATCTGGGCCGCTA | | |
| | | | | TTTCC (SEQ ID NO: | | |
| | | | | 107) | | |
| Standard | PY203 | Primer | 667 | GCCTTGTCTTAGTC | | |
| | | | | ATTGATTTCC (SEQ | | |
| | | | | ID NO: 108) | | |
| RT | PY203 | Primer | 504 | CTCATGATCAGGTT | | |
| | | | | GTCGTTTC (SEQ ID | | |
| | | | | NO: 109) | | |
| RT | PY203 | Primer | 747 | AATCTGGGCCGCTA | | |
| | | | | TTTC (SEQ ID NO: | | |
| | | | | 110) | | |
| RT | PY203 | Primer | 753 | TTTCACACGCCTAG | | |
| | | | | TGG (SEQ ID NO: | | |
| | | | | 111) | | |
| RT | PY203 | Probe | PB6 | CTATCAGTGCTTCC | FAM | BHQ1 |
| | | | | CCAAGTTACTAGAA | | |
| | | | | CC (SEQ ID NO: 112) | | |
| RT | PY203 | Probe | PB8 | TCAGTGTTTGAGGA | HEX | BHQ1 |
| | | | | GGATGTCCACC | | |
| | | | | (SEQ ID NO: 113) | | |
| RT | PY203 | Probe | PB9 | CGCCTTGTCTTAGT | Cy5 | BHQ |
| | | | | CATTGATTTCCTGC | | |
| | | | | (SEQ ID NO: 114) | | |
| RT | PY203 | Probe | PB14 | AATAGGGCCATCG | Texas | BHQ2 |
| | | | | CTCTTAGCCC (SEQ | Red | |
| | | | | ID NO: 115) | | |

*-″Fluor′ means fluorophore

TABLE 18
PY15 and PY203 Event and Locus-specific PCR
Primer Combinations and PCR Product Sizes

| | | | | | PCR | |
|---|---|---|---|---|---|---|
| | | Primer | Primer | Primer | Product | Assay |
| Event | Locus | A | B | C | (bp) | Identifies |
| PY15 | PY15 | 688 | 580 | | 233 | T-DNA locus |
| PY15 | PY15 | 688 | | 732 | 122 | WT locus |
| PY203 | PY203- | 696 | 516 | | 186 | T-DNA locus |
| | 3293 | | | | | |
| PY203 | PY203- | 696 | 504 | | 163 | T-DNA locus |
| | 3293 | | | | | (alternate) |
| PY203 | PY203- | 696 | | 620 | 278 | WT locus |
| | 3293 | | | | | |
| PY203 | PY203- | 666 | 516 | | 136 | T-DNA locus |
| | 3507 | | | | | |
| PY203 | PY203- | 747 | 504 | | 113 | T-DNA locus |
| | 3507 | | | | | (alternate) |
| PY203 | PY203- | 666 | | 667 | 104 | WT locus |
| | 3507 | | | | | |
| PY203 | PY203- | 747 | | 753 | 124 | WT locus |
| | 3507 | | | | | |

[0255] Additionally, Primer 504 (B) combines with Primer 747 (A) to amplify PY203 locus 3507. Primer 747 also combines with Primer 753 (B) to amplify wild type locus corresponding to 3507 locus.

[0256] Standard PCR is performed with 2 μl of DNA extract and GoTaq (Promega) or Kapa 3G (Kapa Biosystems) PCR Mix in 30 μl reaction volumes with the following components and conditions for each event:

[0257] PY15 Standard PCR:

[0258] Components (final concentration): PCR Mix with buffer, MgCl₂, nucleotides, and enzyme (1×); Primer 580 (200 nM); Primer 688 (200 nM); Primer 732 (800 nM)

[0259] Conditions: 95° C., 3 min; 33 cycles (95° C., 30 sec; 60° C., 90 sec; 72° C., 30 sec); 72° C., 8 min

[0260] PY203 Standard PCR:

[0261] Reaction Components (final concentration): PCR Mix with buffer, MgCl₂, nucleotides, and enzyme (1×); Primer 516 (400 nM); Primer 696 (400 nM); Primer 620 (400 nM); Primer 666 (400 nM); Primer 667 (400 nM)

[0262] Conditions: 95° C., 3 min; 33 cycles (95° C., 30 sec; 60° C., 90 sec; 72° C., 30 sec); 72° C., 8 min.

[0263] Standard PCR is analyzed by running approximately 15 μl of PCR product on a 3% agarose gel at 95V for 30 min. An example of results from a standard PCR analysis of selfed segregating PY203 plants is shown in FIG. 17. Referring to this figure, nine PCR reactions from nine independent plants were separated on a 3% agarose gel stained with ethidium bromide. Left panel corresponds to 100 bp ladder; lane 1: null for 3293 and hemizygous for 3507; lane 2; hemizygous for 3293 and hemizygous for 3507; lane 3: hemizygous for 3293 and null for 3507; lane 4: hemizygous for 3293 and hemizygous for 3507; lane 5: null for 3293 and hemizygous for 3507; lane 6: homozygous for 3293 and homozygous for 3507; lane 7: homozygous for 3293 and hemizygous for 3507; lane 8: homozygous for 3293 and homozygous for 3507; and lane 9: hemizygous for 3293 and null for 3507

[0264] Expected locus and zygosity band sizes are indicated on the right side of the image. Locus presence and zygosity was scored by visualizing specific bands in each lane.

[0265] Real-Time PCR was performed with 2 μl of DNA extract in 20 μl reaction volumes with the following components and conditions for each event:

[0266] PY15 Standard PCR:

[0267] Components (final concentration): PCR Mix with buffer, MgCl₂, nucleotides, and enzyme (1×); Primer 580 (400 nM); Primer 688 (400 nM); Primer 732 (400 nM); Probe PB10 (200 nM); Probe PB11 (200 nM)

[0268] Conditions: 95° C., 4 min; 40 cycles (95° C., 5 sec; 60° C., 45 sec)

[0269] PY203 Standard PCR:

[0270] Reaction Components (final concentration): PCR Mix with buffer, MgCl₂, nucleotides, and enzyme (1×); Primer 504 (300 nM); Primer 696 (300 nM); Primer 620 (300 nM); Primer 747 (600 nM); Primer 753 (600 nM); Probe PB6 (200 nM); Probe PB8 (200 nM); Probe PB9 (200 nM); Probe PB14 (200 nM)

[0271] Conditions: 95° C., 4 min; 45 cycles (95° C., 5 sec; 60° C., 60 sec)

[0272] Real-Time PCR can be analyzed by any real-time PCR machine and software capable of four-channel fluorescence detection. A Bio-Rad CFX96 real-time PCR machine and CFX Manager Software were used to run an example of the PY15 real-time PCR assay on a selfed segregating population of PY15 plants as shown on FIG. 18. FIG. 18 illustrates real-time PCR analysis of selfed segregating PY15 plants. X and Y axes represent relative fluorescent units (RFUs) for each probe. Each data point represents an individual PCR reaction and/or plant. In this figure, “wt” refers to wild type; “homo” refers to homozygous; “hemi” refers to hemizygous; “ntc” refers to no target control. PY15 locus presence and zygosity was scored by the clustering of data points on the graph.

[0273] PY53 Event:

[0274] Maize phytase event PY53 (4281_53) carries transgenes that result in seed-specific expression of phytase enzyme. PY53 carries multiple T-DNAs at a single genetic locus. Molecular identification and tracking of the PY53 locus can be done using standard (endpoint gel-based) PCR or real-time PCR. In addition to determining whether a plant is carrying a transgene, these assays can also determine whether a plant is hemizygous (carrying one copy of the insertion) or homozygous (carrying two copies of the insertion). With the PY53 locus, two locus bands are expected and amplified in a multiplex standard PCR reaction as shown in FIG. 19 and a multiplex real time PCR reaction as shown in FIG. 20. There is also one PCR fragment that is amplified from an unknown (and presumably unrelated) genomic location (currently being characterized) that does not interfere with the ability to determine locus presence and zygosity in the gel-based assay (FIG. 19) or the real-time PCR assay (FIG. 20; similar results were observed between both assays with identical samples).

[0275] PCR

[0276] PY53 standard and real-time PCR primers are listed in Table 19 and standard PCR primer combinations with expected PCR product sizes are listed in Table 20.

TABLE 19
Standard and Real-time (RT) PCR Primers and Probes
Used to Determine T-DNA Locus Presence and Zygosity of the PY53 Event

| | | Primer | | | | |
|---|---|---|---|---|---|---|
| PCR | | or | Primer/ | | | |
| Assay | Event | Probe | Probe ID | Primer Sequence | Fluor* | Quencher |
| Standard/ | PY53 | Primer | 511 | GCGCGGTGTCATCTATG | | |
| RT | | | | TTA (SEQ ID NO: 119) | | |
| Standard/ | PY53 | Primer | 779 | GAGCCCGATCCTAATCC | | |
| RT | | | | AATC (SEQ ID NO: 120) | | |
| Standard/ | PY53 | Primer | 784 | GCCTTGTAGCCTTCTTG | | |
| RT | | | | AGTAT (SEQ ID NO: 121) | | |
| RT | PY53 | Probe | PB15 | ATCTCGCCACCTCTTCC | HEX | BHQ1 |
| | | | (loc)** | ACATCAC (SEQ ID NO: | | |
| | | | | 122) | | |
| RT | PY53 | Probe | PB16 | TGTGATGATGTGGTCTG | FAM | BHQ1 |
| | | | (zyg)*** | GTTGGGC (SEQ ID NO: | | |
| | | | | 123) | | |

*-″Fluor″ means fluorophore
**-″loc″ means locus target
***-″zyg″ means zygosity target

TABLE 20
PY53 Event and Locus-specific PCR Primer
Combinations and PCR Product Sizes

| | | | | | PCR | |
|---|---|---|---|---|---|---|
| | | Primer | Primer | Primer | Product | Assay |
| Event | Locus | A | B | C | (bp) | Identifies |
| PY53 | PY53 | 784 | 511 | | 377 | T-DNA locus |
| | | | | | | (border 1) |
| PY53 | PY53 | 779 | 511 | | 158 | T-DNA locus |
| | | | | | | (border 2) |
| PY53 | PY53 | 784 | | 779 | 319 | WT locus |

[0277] Standard PCR can be performed with 2 μl of DNA extract and GoTaq (Promega) PCR Mix in 30 μl reaction volumes with the following components and conditions for each event:

[0278] PY53 Standard PCR:

[0279] Components (final concentration): PCR Mix with buffer, MgCl₂, nucleotides, and enzyme (1×); Primer 511 (400 nM); Primer 779 (400 nM); Primer 784 (400 nM).

[0280] Conditions: 95° C., 3 min; 33 cycles (95° C., 30 sec; 60° C., 30 sec; 72° C., 30 sec); 72° C., 8 min

[0281] Standard PCR is analyzed by running approximately 15 μl of PCR product on a 3% agarose gel at 95V for 30 min. An example of results from a standard PCR analysis of event PY53 is shown in FIG. 19. Locus presence and zygosity is scored by visualizing specific bands in each lane.

[0282] Real-Time PCR is performed with 2 μl of DNA extract in 20 μl reaction volumes with the following components and conditions for each event:

[0283] PY53 Real Time PCR:

[0284] Components (final concentration): PCR Mix with buffer, MgCl₂, nucleotides, and enzyme (1×); Primer 511 (400 nM); Primer 779 (400 nM); Primer 784 (400 nM); Probe PB15 (200 nM); and Probe PB16 (200 nM).

[0285] Conditions: 95° C., 4 min; 40 cycles (95° C., 5 sec; 60° C., 45 sec).

[0286] Real-Time PCR can be analyzed by any real-time PCR machine and software capable of two-channel fluorescence detection. A Bio-Rad CFX96 real-time PCR machine and CFX Manager Software were used to run an example of the PY53 real-time PCR assay on a selfed segregating population of PY53 plants (FIG. 20). PY53 locus presence and zygosity is scored by the clustering of data points on the graph.

[0287] PY209 Event (4295_209):

[0288] Maize phytase event PY209 was created by a T-DNA inserted in chromosome 4. Molecular identification and tracking of the PY209 locus can be done using standard (endpoint gel-based) PCR or real-time PCR. In addition to determining whether a plant is carrying a transgene, these assays can also determine whether a plant is hemizygous (carrying one copy of the insertion) or homozygous (carrying two copies of the insertion).

[0289] PCR

[0290] PY209 standard and real-time PCR primers are listed in Table 21 and standard PCR primer combinations with expected PCR product sizes are listed in Table 22.

TABLE 21
Standard and Real-time (RT) PCR Primers and Probes
Determine T-DNA Locus Presence and Zygosity of the PY209

| | | Primer | | |
|---|---|---|---|---|
| PCR | | or | Primer/ | |
| Assay | Event | Probe | Probe ID | Primer Sequence |
| Standard/ | | Primer | 456 | GGCGAGCTCGAATTAATTC |
| RT | | | (loc)* | AGTAC (SEQ ID NO: 160) |
| Standard/ | PY209 | Primer | 513 | AAACGTCCGCAATGTGTTA |
| RT | | | (loc)* | TT (SEQ ID NO: 161) |
| Standard/ | | Probe | PB15 | CCGCAATGTGTTATTAAGT |
| RT | | | (loc)* | TGTCTAAGCGT (SEQ ID |
| | | | | NO: 122) |
| Standard/ | PY209 | Probe | PB22 | CACAGATACTCCATATGCA |
| RT | | | (zyg)* | ACTTAGGTACAGC (SEQ ID |
| | | | | NO: 163) |
| Standard/ | PY209 | Primer | 889 | AGGTCCAGGTTGTATCAGTGA |
| RT | | | (zyg)** | (SEQ ID NO: 164) |
| Standard/ | PY209 | Primer | 909 | GAGATCGCTGCAGAGTGC |
| RT | | | (zyg)** | (SEQ ID NO: 165) |

*-″loc″ means locus target
**-″zyg″ means zygosity target

TABLE 22
PY209 event and locus-specific PCR primer
combinations and PCR product sizes

| | | Primer | Primer | PCR Product | Assay |
|---|---|---|---|---|---|
| Event | Locus | A | B | (bp) | Identifies |
| PY209 | PY209loc | 513 | 889 | 112 | T-DNA locus |
| | | | | | (border 1) |
| PY209 | PY209zyg | 889 | 909 | 141 | WT locus |
| PY209 | PY209loc | 456 | 889 | 138 | T-DNA locus |
| PY209 | PY209zyg | 889 | 909 | 129 | WT locus |

[0291] Standard PCR can be performed with 2 μl of DNA extract and GoTaq (Promega) PCR Mix in 30 μl reaction volumes with the following components and conditions for each event:

[0292] PY209 Standard PCR:

[0293] Components (final concentration): PCR Mix with buffer, MgCl₂, nucleotides, and enzyme (1×); Primer 513 (400 nM); Primer 889 (200 nM); Primer 909 (200 nM).

[0294] Conditions: 95° C., 3 min; 33 cycles (95° C., 30 sec; 60° C., 30 sec; 72° C., 30 sec); 72° C., 8 min

[0295] Standard PCR is analyzed by running approximately 10 μl of PCR product on a 3% agarose gel at 95V for 30 min. Locus presence and zygosity is scored by visualizing specific bands in each lane.

[0296] Real-Time PCR is performed with 2 μl of DNA extract in 20 μl reaction volumes with the following components and conditions for each event:

[0297] PY209 Real Time PCR:

[0298] Components (final concentration): PCR Mix with buffer, MgCl₂, nucleotides, and enzyme (1×); Primer 456 (400 nM); Primer 889 (400 nM); Primer 909 (400 nM); Probe PB15 (200 nM); Probe PB22 (200 nM).

[0299] Conditions: 95° C., 4 min; 40 cycles (95° C., 5 sec; 60° C., 45 sec).

[0300] Real-Time PCR can be analyzed by any real-time PCR machine and software capable of two-channel fluorescence detection. A Bio-Rad CFX96 real-time PCR machine and CFX Manager Software were used to run an example of the PY209 real-time PCR assay on a selfed segregating population of PY209 plants. PY209 locus presence and zygosity is scored by the clustering of data points on the graph.

[0301] An example of results from a standard PCR analysis of selfed segregating PY209 plants is shown in FIG. 21. Referring to this figure, 11 PCR reactions from eleven independent plants were separated on a 3% agarose gel stained with ethidium bromide. Expected locus and zygosity band sizes are indicated on the respective left and right sides of the image. Locus presence and zygosity was scored by visualizing specific bands in each lane.

[0302] PY 1053 (4915 1053) and PY1203 (4916_1203) Event:

[0303] Both maize phytase events PY1053 and PY1203 are expected to carry at least two T-DNAs. Molecular identification and tracking of the PY1053 locus and PY1203 locus can be done using standard (endpoint gel-based) PCR or real-time PCR. In addition to determining whether a plant is carrying a transgene, these assays can also determine whether a plant is hemizygous (carrying one copy of the insertion) or homozygous (carrying two copies of the insertion).

[0304] PCR

[0305] PY1053 and PY1203 standard and real-time PCR primers are listed in Table 23 and standard PCR primer combinations with expected PCR product sizes are listed in Table 24.

TABLE 23
Standard and real-time (RT) PCR primers and probes
used to determine T-DNA locus presence and zygosity of the PY1053
and PY1203 event

| | | Primer | | |
|---|---|---|---|---|
| PCR | | or | Primer/ | |
| Assay | Event | Probe | Probe ID | Primer/Probe Sequence |
| Standard/ | PY1053 | Primer | 925 | GGTGATGTCGTACGCTTGT |
| RT | | | | (SEQ ID NO: 166) |
| Standard/ | PY1053 | Primer | 926 | AGCTGTAAAGTCATTCGAG |
| RT | | | | GATAG (SEQ ID NO: 167) |
| Standard/ | PY1053 | Primer | 505 | TGTTACTAGATCGGGAAT |
| RT | | | | TGGC (SEQ ID NO: 168) |
| Standard/ | PY1203 | Primer | 456 | GGCGAGCTCGAATTAAT |
| RT | | | | TCAGTAC (SEQ ID NO: |
| | | | | 160) |
| Standard/ | PY1053/ | Probe | PB15 | CCGCAATGTGTTATTAAG |
| RT | PY1203 | | | TTGTCTAAGCGT (SEQ ID |
| | | | | NO: 122) |
| Standard/ | PY1203 | Probe | PB21 | ACGATTCTGTCCTGTGGTCA |
| RT | | | | CTGC (SEQ ID NO: 162) |
| Standard/ | PY1053 | Probe | PB23 | CTCTCTCTCTCCTTTTCA |
| RT | | | | TGGCTCTTTTGTTT (SEQ |
| | | | | ID NO: 169) |
| Standard/ | PY1053 | Primer | 513 | AAACGTCCGCAATGTGTT |
| RT | | | (loc)* | ATT (SEQ ID NO: 161) |
| Standard/ | PY1203 | Primer | 908 | ATACTAAAAAGGCACGA |
| RT | | | (loc)* | CCGTC (SEQ ID NO: 170) |
| Standard/ | PY1203 | Primer | 890 | TGGTCAAGATAGGTGGC |
| RT | | | (loc)* | TTCT (SEQ ID NO: 171) |
| Standard/ | PY1203 | Primer | 855 | ATGATTAGAGTCCCGCA |
| RT | | | (loc)* | ATTATACA (SE ID NO: |
| | | | | 172) |
| Standard/ | PY1053 | Primer | 886 | TCCCTCTCCATTCCTCCT |
| RT | | | (zyg)** | TT (SEQ ID NO: 173) |
| Standard/ | PY1053 | Primer | 887 | CGCTCGAATTGTTGCATG |
| RT | | | (zyg)** | TT (SEQ ID NO: 174) |

*-″loc″ means locus target
**-″zyg″ means zygosity target

TABLE 24
PY1053 and PY1203 event and locus-specific PCR
primer combinations and PCR product sizes

| | | Primer | Primer | PCR Product | Assay |
|---|---|---|---|---|---|
| Event | Locus | A | B | (bp) | Identifies |
| PY1053 | PY1053 | 513 | 887 | 179 | T-DNA locus1 |
| | loc1 | | | | (border 1) |
| PY1053 | PY1053 | 513 | 886 | 227 | T-DNA locus2 |
| | loc2 | | | | (border 2) |
| PY1053 | PY1053 | 886 | 887 | 296 | WT locus |
| | zyg | | | | |
| PY1053 | PY1053 | 505 | 925 | 159 | T-DNA locus |
| | loc | | | | |
| PY1053 | PY1053 | 925 | 926 | 190 | WT locus |
| | zyg | | | | |
| PY1203 | PY1203 | 855 | 890 | 228 | T-DNA locus1 |
| | loc1 | | | | (border 1) |
| PY1203 | PY1203 | 908 | 890 | 119 | WT locus |
| | zyg | | | | |
| PY1203 | PY1203 | 855 | 908 | 182 | T-DNA locus2 |
| | loc2 | | | | (border 1) |
| PY1203 | PY1203 | 890 | 908 | 87 | WT locus |
| | zyg | | | | |
| PY1203 | PY1203 | 456 | 890 | 112 | T-DNA locus |
| | loc | | | | (border) |

[0306] Standard PCR can be performed with 2 μl of DNA extract and GoTaq (Promega) PCR Mix in 30 μl reaction volumes with the following components and conditions for each event:

[0307] PY1053 Standard PCR:

[0308] Components (final concentration): PCR Mix with buffer, MgCl₂, nucleotides, and enzyme (1×); Primer 513 (400 nM); Primer 886 (400 nM); Primer 887 (400 nM).

[0309] Conditions: 95° C., 3 min; 33 cycles (95° C., 30 sec; 60° C., 30 sec; 72° C., 30 sec); 72° C., 8 min.

[0310] PY1203 Standard PCR:

[0311] Components (final concentration): PCR Mix with buffer, MgCl₂, nucleotides, and enzyme (1×); Primer 513 (400 nM); Primer 890 (400 nM); Primer 908 (400 nM).

[0312] Conditions: 95° C., 3 min; 33 cycles (95° C., 30 sec; 60° C., 30 sec; 72° C., 30 sec); 72° C., 8 min.

[0313] Standard PCR is analyzed by running approximately 15 μl of PCR product on a 3% agarose gel at 95V for 30 min. Locus presence and zygosity is scored by visualizing specific bands in each lane.

[0314] An example of results from a standard PCR analysis of selfed segregating PY1053 and PY1203 plants are shown in respective FIGS. 22 and 23. Referring to FIG. 22, eight PCR reactions from eight independent plants were separated on a 3% agarose gel stained with ethidium bromide. Referring to FIG. 23, ten PCR reactions from ten independent plants were separated on a 3% agarose gel stained with ethidium bromide. Referred to these figures, expected locus and zygosity band sizes are indicated on the respective left and right sides of the image. Locus presence and zygosity was scored by visualizing specific bands in each lane.

[0315] Real-Time PCR is performed with 2 μl of DNA extract in 20 μl reaction volumes with the following components and conditions for each event:

[0316] PY1053 Real Time PCR:

[0317] Components (final concentration): PCR Mix with buffer, MgCl₂, nucleotides, and enzyme (1×); Primer 505 (400 nM); Primer 925 (400 nM); Primer 926 (400 nM); Probe PB15 (200 nM); Probe PB23 (200 nM).

[0318] Conditions: 95° C., 4 min; 40 cycles (95° C., 5 sec; 60° C., 45 sec)

[0319] Real-Time PCR can be analyzed by any real-time PCR machine and software capable of two-channel fluorescence detection. A Bio-Rad CFX96 real-time PCR machine and CFX Manager Software were used to run an example of the PY1053 real-time PCR assay on a selfed segregating population of PY1053 plants. PY1053 locus presence and zygosity is scored by the clustering of data points on the graph.

[0320] PY1203 Real Time PCR:

[0321] Components (final concentration): PCR Mix with buffer, MgCl₂, nucleotides, and enzyme (1×); Primer 456 (400 nM); Primer 890 (400 nM); Primer 908 (400 nM); Probe PB15 (200 nM); Probe PB21 (200 nM).

[0322] Conditions: 95° C., 4 min; 40 cycles (95° C., 5 sec; 60° C., 45 sec)

[0323] Real-Time PCR can be analyzed by any real-time PCR machine and software capable of two-channel fluorescence detection. A Bio-Rad CFX96 real-time PCR machine and CFX Manager Software were used to run an example of the PY1203 real-time PCR assay on a selfed segregating population of PY1203 plants. PY1203 locus presence and zygosity is scored by the clustering of data points on the graph.

### Example 9. Expressing Codon Optimized Phy02 Sequence

[0324] Enhanced expression of phytase in transgenic grain can provide an added value to the final product by lowering the necessary acreage required to produce any specified amount of protein (or a specified number of phytase units (FTUs)), thereby reducing the operations required for identity preservation of the grain, and by reducing the amount of necessary storage and transportation per unit of phytase activity, all of which lower the cost per dose of phytase in formulated feed. Comparative analysis of phytase expression in transgenic seed revealed that the median level of Nov9x phytase expression in transgenic lines, as it is assessed by phytase protein specific activity, is higher and reaches up to 5000 FTU/g in the best hemizygous Nov9x expressors in the contrast to Phy-02 expression from otherwise identical constructs. Comparison of the coding DNA for Nov9x and Phy-02 demonstrated significant divergence of nucleotide sequences with only 85.6% sequence identity between the two sequences. These differences provided an opportunity for the enhancement of phytase gene expression by optimizing the DNA sequence encoding Phy-02 to more closely reflect the codon usage of Nov9x as a more highly expressed gene. In total, 161 base pairs in xGZein27ss:Phy-02:SEKDEL coding DNA were replaced by Nov9x specific nucleotides, which are shown in bold and enlarged characters and underlined in the multiple sequence alignment between Nov9x, Phy-02, and resulting optimized sequence Phy-02opt (see below). The unique mutations in Phy-02 (underlined in the alignment) that are associated with improved thermostability and digestibility of the phytase protein were preserved in Phy-02opt sequence. The improved Phy-02opt was cloned into plant expression vectors pAG4913 (SEQ ID NO: 62), pAG4912 (SEQ ID NO: 70), pAG4294 (SEQ ID NO: 76), pAG4915 (SEQ ID NO: 60), pAG4916 (SEQ ID NO: 64) and pAG4295 (SEQ ID NO: 181) designed for seed specific expression and transformed into maize. The seeds from generated transgenic events were analyzed for phytase specific expression in the same manner as events expressing Nov9x or Phy-02 were analyzed. The resulting expression data demonstrate a clear improvement in Phy-02 expression from the Phy-02opt sequence, with multiple events demonstrating specific activities in hemizygous seed greater than 2500 FTU/g, some over 3700 FTU/g, and some events approaching 5000 FTU/g in hemizygous seed.

Multiple alignment of DNA coding sequences for Nov9x, Phy-02, and Phy-02opt are shown below:

| | |
|---|---|
| | 1 50 |
| Nov9x | GCTGCGCAGT CCGAGCCGGA GCTGAAGCTG GAGTCCGTGG TGATCGTGTC |
| Phy02 | ...GCCCAGA GCGAGCCGGA GCTGAAGCTG GAGAGCGTGG TGATCGTGAG |
| Phy02opt | GCTGCGCAGT CCGAGCCGGA GCTGAAGCTG GAGTCCGTGG TGATCGTGTC |
| | 51 100 |
| Nov9x | GCGCCACGGG GTGCGCGCCC CGACCAAGGC CACGCAGCTC ATGCAGGACG |
| Phy02 | CAGGCACGGC GTGAGGGCCC CGACCAAGTT CACCCAGCTG ATGCAGGACG |
| Phy02opt | GCGCCACGGG GTGCGCGCCC CGACCAAGTT CACGCAGCTC ATGCAGGACG |
| | 101 150 |
| Nov9x | TGACCCCGGA CGCCTGGCCG ACCTGGCCGG TGAAGCTCGG CGAGCTGACC |
| Phy02 | TGACCCCGGA CGCGTTCTAC ACCTGGCCGG TGAAGCTGGG CGAGCTGACC |
| Phy02opt | TGACCCCGGA CGCCTTCTAC ACCTGGCCGG TGAAGCTCGG CGAGCTGACC |
| | 151 200 |
| Nov9x | CCGCGCGGCG GCGAGCTGAT CGCCTACCTC GGCCACTACT GGCGCCAGCG |
| Phy02 | CCGAGGGGCG GCGAGCTGAT CGCCTACCTG GGCCACTACT GGAGGCAGAG |
| Phy02opt | CCGCGCGGCG GCGAGCTGAT CGCCTACCTC GGCCACTACT GGCGCCAGCG |
| | 201 250 |
| Nov9x | CCTCGTGGCC GACGGCCTCC TCCCGAAGTG CGGCTGCCCG CAGTCCGGCC |
| Phy02 | GCTGGTGGCC GACGGCCTGC TGCCGAAGAA GGGCTGCCCG CAGAGCGGCC |
| Phy02opt | CCTCGTGGCC GACGGCCTCC TCCCGAAGAA GGGCTGCCCG CAGTCCGGCC |
| | 251 300 |
| Nov9x | AGGTGGCGAT CATCGCCGAC GTGGACGAGC GCACCCGCAA GACGGGCGAG |
| Phy02 | AGGTGGCCAT CATCGCCGAC GTGGACGAGA GGACCAGGAA GACCGGTGAG |
| Phy02opt | AGGTGGCGAT CATCGCCGAC GTGGACGAGC GCACCCGCAA GACGGGCGAG |
| | 301 350 |
| Nov9x | GCCTTCGCCG CCGGCCTCGC CCCGGACTGC GCCATCACCG TGCACACCCA |
| Phy02 | GCCTTCGCCG CCGGCCTGGC CCCGGACTGC GCCATCACCG TGCACACCCA |
| Phy02opt | GCCTTCGCCG CCGGCCTCGC CCCGGACTGC GCCATCACCG TGCACACCCA |
| | 351 400 |
| Nov9x | GGCCGACACC TCCTCCCCGG ACCCGCTCTT CAACCCGCTC AAGACCGGCG |
| Phy02 | GGCCGACACC AGCAGCCCGG ACCCGCTGTT CAACCCGCTG AAGACCGGCG |
| Phy02opt | GGCCGACACC TCCTCCCCGG ACCCGCTCTT CAACCCGCTC AAGACCGGCG |
| | 401 450 |
| Nov9x | TGTGCCAGCT CGACAACGCC AACGTGACCG ACGCCATCCT GGAGCGCGCC |
| Phy02 | TGTGCCAGCT GGACGTGGCC CAGGTGACCG ACGCCATCCT GGAGAGGGCC |
| Phy02opt | TGTGCCAGCT CGACGTGGCC CAGGTGACCG ACGCCATCCT GGAGCGCGCC |
| | 451 500 |
| Nov9x | GGCGGCTCCA TCGCCGACTT CACCGGCCAC TACCAGACCG CCTTCCGCGA |
| Phy02 | GGCGGGAGCA TCGCCGACTT CACCGGCCAC TACCAGACCG CCTTCAGGGA |
| Phy02opt | GGCGGCTCCA TCGCCGACTT CACCGGCCAC TACCAGACCG CCTTCCGCGA |
| | 501 550 |
| Nov9x | GCTGGAGCGC GTGCTCAACT TCCCGCAGTC GAACCTCTGC CTCAAGCGCG |
| Phy02 | GCTGGAGAGG GTGCTGAACT TCCCGCAGAG CAACCTGGCC CTGAAGAGGG |
| Phy02opt | GCTGGAGCGC GTGCTCAACT TCCCGCAGTC GAACCTCGCC CTCAAGCGCG |
| | 551 600 |
| Nov9x | AGAAGCAGGA CGAGTCCTGC TCCCTCACCC AGGCCCTCCC GTCCGAGCTG |
| Phy02 | AGAAGCAGGA CGAGAGCGCC AGCCTGACCC AGGCCCTGCC GAGCGAGCTG |
| Phy02opt | AGAAGCAGGA CGAGTCCGCC TCCCTCACCC AGGCCCTCCC GTCCGAGCTG |
| | 601 650 |
| Nov9x | AAGGTGTCCG CCGACTGCGT GTCCCTCACC GGCGCCGTGT CCCTCGCCTC |
| Phy02 | AAGGTGAGCG CCGACAACGT GAGCCTGACC GGCGCCTGGA GCCTGGCCAG |
| Phy02opt | AAGGTGTCCG CCGACAACGT GTCCCTCACC GGCGCCTGGT CCCTCGCCTC |
| | 651 700 |
| Nov9x | CATGCTCACC GAAATCTTCC TCCTCCAGCA GGCCCAGGGC ATGCCGGAGC |
| Phy02 | CATGCTGACC GAGATTTTCC TGCTGCAGCA GGCCCAGGGC ATGCCGGAGC |
| Phy02opt | CATGCTCACC GAAATCTTCC TCCTCCAGCA GGCCCAGGGC ATGCCGGAGC |
| | 701 750 |
| Nov9x | CGGGCTGGGG CCGCATCACC GACTCCCACC AGTGGAACAC CCTCCTCTCC |
| Phy02 | CGGGCTGGGG CAGGATCACC GACAGCCACC AGTGGAACAC CCTGCTGAGC |
| Phy02opt | CGGGCTGGGG CCGCATCACC GACTCCCACC AGTGGAACAC CCTCCTCTCC |
| | 751 800 |
| Nov9x | CTCCACAACG CCCAGTTCGA CCTCCTCCAG CGCACCCCGG AGGTGGCCCG |
| Phy02 | CTGCACAACG CCCAGTTCGA CCTGCTGCAG AGGACCCCGG AGGTGGCCAG |
| Phy02opt | CTCCACAACG CCCAGTTCGA CCTCCTCCAG CGCACCCCGG AGGTGGCCCG |
| | 801 850 |
| Nov9x | CTCCCGCGCC ACCCCGCTCC TCGACCTCAT CAAGACCGCC CTCACCCCGC |
| Phy02 | GAGCAGGGCC ACCCCGCTGC TGGACCTGAT CAAGACCGCC CTGACCCCGC |
| Phy02opt | CTCCCGCGCC ACCCCGCTCC TCGACCTCAT CAAGACCGCC CTCACCCCGC |
| | 851 900 |
| Nov9x | ACCCGCCGCA GAAGCAGGCC TACGGCGTGA CCCTCCCGAC CTCGGTGCTC |
| Phy02 | ACCCGCCGCA GAAGCAGGCC TACGGCGTGA CCCTGCCGAC CAGCGTGCTG |
| Phy02opt | ACCCGCCGCA GAAGCAGGCC TACGGCGTGA CCCTCCCGAC CTCGGTGCTC |
| | 901 950 |
| Nov9x | TTCATCGCCG GCCACGACAC CAACCTCGCC AACCTCGGCG GCGCCCTGGA |
| Phy02 | TTCATCGCCG GCCACGACAC CAACCTGGCC AACCTGGGCG GCGCCCTCGA |
| Phy02opt | TTCATCGCCG GCCACGACAC CAACCTCGCC AACCTCGGCG GCGCCCTGGA |
| | 951 1000 |
| Nov9x | GCTGAACTGG ACCCTCCCGG GCCAGCCGGA CAACACCCCG CCGGGCGGCG |
| Phy02 | GCTGCAGTGG ACCCTGCCGG GCCAGCCGGA CAACACCCCG CCGGGCGGCG |
| Phy02opt | GCTGCAGTGG ACCCTCCCGG GCCAGCCGGA CAACACCCCG CCGGGCGGCG |
| | 1001 1050 |
| Nov9x | AGCTGGTGTT CGAGCGCTGG CGCCGCCTCT CCGACAACTC CCAGTGGATT |
| Phy02 | AGCTGGTGTT CGAGAGGTGG AGGAGGCTGA GCGACAACAG CCAGTGGATT |
| Phy02opt | AGCTGGTGTT CGAGCGCTGG CGCCGCCTCT CCGACAACTC CCAGTGGATT |
| | 1051 1100 |
| Nov9x | CAGGTGTCCC TCGTGTTCCA GACCCTCCAG CAGATGCGCG ACAAGACCCC |
| Phy02 | CAGGTGAGCC TGGTGTTCCA GACCCTGCAG CAGATGAGGG ACAAGACCCC |
| Phy02opt | CAGGTGTCCC TCGTGTTCCA GACCCTCCAG CAGATGCGCG ACAAGACCCC |
| | 1101 1150 |
| Nov9x | GCTCTCCCTC AACACCCCGC CGGGCGAGGT GAAGCTCACC CTGGCCGGCT |
| Phy02 | GCTGTTCCTG AACACCCCGC CGGGCGAGGT GAAGCTGACC CTGGCCGGCT |
| Phy02opt | GCTCTTCCTC AACACCCCGC CGGGCGAGGT GAAGCTCACC CTGGCCGGCT |
| | 1151 1200 |
| Nov9x | GCGAGGAGCG CAACGCGCAG GGCATGTGCT CCCTCGCCGG CTTCACCCAG |
| Phy02 | GCGAGGAGAG GAACGCCCAG GGCATGTGCA GCCTGGCCGG CTTCACCCAG |
| Phy02opt | GCGAGGAGCG CAACGCGCAG GGCATGTGCT CCCTCGCCGG CTTCACCCAG |
| | 1201 1239 |
| Nov9x | ATCGTGAACG AGGCCCGCAT CCCGGCCTGC TCCCTCTAA (SEQ ID NO: 21) |
| Phy02 | ATCGTGAACG AGGCCAGGAT TCCGGCCTGC AGCCTGTGA (SEQ ID NO: 15) |
| Phy02opt | ATCGTGAACG AGGCCCGCAT CCCGGCCTGC TCCCTCTAA (SEQ ID NO: 17) |

### REFERENCES

[0325] Arakawa, T., Chong, D. K., & Langridge, W. H. (1998). Efficacy of a food plant-based oral cholera toxin B subunit vaccine. Nature Biotechnology, 16(3), 292-297. doi:10.1038/nbt0398-292
[0326] Basu, S. S., Winslow, S., Nelson, A., Ono, M., & Betts, S. (2009). EXTRACTION METHODS AND ASSAYS FOR FEED ENZYMES.
[0327] Cervelli, M., Di Caro, O., Di Penta, A., Angelini, R., Federico, R., Vitale, A., & Mariottini, P. (2004). A novel C-terminal sequence from barley polyamine oxidase is a vacuolar sorting signal. Plant Journal, 40(3), 410-418. doi: 10.1111/j.1365-313X.2004.02221.X
[0328] Haq, T. a, Mason, H. S., Clements, J. D., & Arntzen, C. J. (1995). Oral immunization with a recombinant bacterial antigen produced in transgenic plants. Science (New York, N.Y.), 268(5211), 714-716. doi:10.1126/science.7732379
[0329] Lawrence, C J, Dong, Q, Polacco, M L, Seigfried, T E, and Brendel, V. (2004) MaizeGDB, the community database for maize genetics and genomics. Nucleic Acids Research 32:D393-D397.
[0330] Korban, S. S. (2002). Targeting and expression of antigenic proteins in transgenic plants for production of edible oral vaccines. In Vitro Cellular & Developmental Biology—Plant, 38(3), 231-236. doi:10.1079/IVP2002292
[0331] Munro, S., & Pelham, H. R. (1987). A C-terminal signal prevents secretion of luminal ER proteins. Cell, 48(5), 899-907. doi:10.1016/0092-8674(87)90086-9

[0332] The references cited throughout this application, are incorporated for all purposes apparent herein and in the references themselves as if each reference was fully set forth. For the sake of presentation, specific ones of these references are cited at particular locations herein. A citation of a reference at a particular location indicates a manner(s) in which the teachings of the reference are incorporated. However, a citation of a reference at a particular location does not limit the manner in which all of the teachings of the cited reference are incorporated for all purposes.

[0333] It is understood, therefore, that this invention is not limited to the particular embodiments disclosed, but is intended to cover all modifications which are within the spirit and scope of the invention as defined by the appended claims; the above description; and/or shown in the attached drawings.

1. A maize plant or part thereof comprising one or more synthetic polynucleotides that comprise a sequence selected from the group consisting of: SEQ ID NOS: 42, 43, 156, 157, 158, and 159, wherein the sequence is an amplicon diagnostic for an event.

2. The maize plant or part thereof of claim 1, wherein the one or more synthetic polynucleotides comprise a sequence of SEQ ID NO: 42, or 43, and produce an amplicon diagnostic for event PY203.

3-4. (canceled)

5. The maize plant or part thereof of claim 1, wherein the one or more synthetic polynucleotides comprise the sequence of SEQ ID NOS: 156 and 157, and produce an amplicon diagnostic for event PY1053.

6. The maize plant or part thereof of claim 1, wherein the one or more synthetic polynucleotides comprise the sequence of SEQ ID NOS: 158 and 159, and produce an amplicon diagnostic for event PY1203.

7. (canceled)

8. A maize plant or part thereof comprising one or more synthetic nucleic acids comprising a sequence with at least 90% identity to a sequence selected from the group consisting of: SEQ ID NOS: 11, 13, 15, 17, 19, 25, and 27, or a complement thereof.

9-14. (canceled)

15. A kit for identifying event PY203, PY1053 or PY1203 in a sample, wherein the kit comprises a first primer and a second primer, which are capable of amplifying a synthetic polynucleotide selected from the group consisting of SEQ ID NOS: 128, 130, 131, 133, 177, 178, 179, and 180.

16. The kit of claim 15, wherein the first primer is a sequence selected from the group consisting of SEQ ID NOS: 107, 110, 161 and 172, and the second primer is a sequence selected from the group consisting of SEQ ID NOS: 104, 109, 170, 171, 173, and 174.

17-20. (canceled)

21. A kit for identifying maize plant or part thereof comprising one or more synthetic nucleic acids encoding a phytase in a sample, wherein the kit comprises a first primer and a second primer capable of amplifying a synthetic polynucleotide selected from the group consisting of SEQ ID NOS: 60, 64, and 149.

22. (canceled)

23. An animal feedstock comprising a maize plant, or part thereof of claim 1 or 8 or the progeny of the maize plant.

24-30. (canceled)

31. A method of producing an animal feedstock comprising mixing a maize plant or part thereof of claim 1 or 8, or the progeny of the maize plant, with plant material.

32. The method of claim 31 further comprising pelletizing the mixture.

33. The method of claim 32 further comprising adding a feed supplement to the mixture.

34-36. (canceled)

37. A method of producing an animal meat comprising feeding an animal with an animal feedstock comprising a maize plant or part thereof of claim 1 or 8, or the progeny of the maize plant.

38. The method of claim 37 further comprising preparing the animal feedstock according to a method of claim 31.

39-40. (canceled)

41. The method of claim 37, wherein the animal feedstock contains a deficient or an adequate level of phosphate.

42. The method of claim 41, wherein animal feedstock contains the adequate level of phosphate, and the adequate level of phosphate is in a range from 0.30% (w/w) to 0.50% (w/w) of phosphate per animal feed or in a range from 0.20% (w/w) to 0.50% (w/w) of phosphate per animal feedstock.

43. The method of claim 41, wherein the animal feedstock contains the deficient level of phosphate, and the deficient level of phosphate is less than 20% (w/w) of phosphate per animal feed, or is less than 30% (w/w) of phosphate per animal feed.

44. The method of claim 37, wherein the maize plant or part thereof comprises a phytase at a dose equal to 3000 FTU/kg, or greater.

45. The method of claim 44, wherein the maize plant or part thereof comprises a phytase at a dose equal to 60,000 FTU/kg, or lesser.

46-70. (canceled)

The application's sequence listing, which the Patent Office published only in electronic form, follows.

SEQUENCE LISTING (184 sequences)

SEQ ID NO: 1 - DNA, 2000 bp, Zea mays
  promoter (1)..(2000): Maize oleosin 16
ataaaattttagtgaagctaaagcggtgaaagattatagaatttgatgtgccagattaataaatcgattaactcctaaagttcaagccgagactacagacacatgagctacataaatgagccaaggactcgagcaaagacaaatcgacacagacattataattcaagtcattctagaagattcatgagaagagtatcatttatttaaatcaatgacttgatcaaataagacctaggagctactattgataatatatatcatgggtatctagatcaagcattatgaagaagagcctaagtagaaggccccatgggctcgaccacaaacccaaggactcgacaataaagtctaggagggatcccatagctaaaaggactctagaagtgtatgtatggtaaagattttatcgagacaagaaatacgataaagatcttaacagaatcggagtcatacttgtaaaaatagagttggactcgtgtacaacttggtcttcgacttagttcggtcatgaattcagtaaccgactagatatgtaccatggaacccctagggcatgaggctatgagccataggatcatcagatccaaacatacaccaacaaatccatcacacaccgaagatccatattaacaagggattagctactttacaatttcagagtaacaaatagagccaaactcatagcacaggggaacttcatatcacaaatggaggcattgaattgatataaaaagctaaagttctaaaaagtttgaagtgctgaaacttcaaagccgctaactagtgaagcaccgaagccttccggggagagaagacatacacgacacgttagggacgtaaaatgacgaaattatacaactacctctatatgtaacacttatgtaatagaaaagacagaatccatatgaagatgtataatggatcaaccatataaatagataaacaatatatctgctatggggattggcattcttgtatccctacgcctgtatatcccctgtttagagaacctccgaaggtatatgatgctgaagattattgttgtcttgtctttcatcatatatcgagtctttccctaggatattattattcgcaatgtgcattacatggttaatcgattgagagaacatgcatctcacctttagctgataaacgataatccatgttttacacttcgtagctactcatgagtttcgatatacaaatttgttttctggactacgtaccattccatcctcttaggagaggagaggaagtgtcctcgatttaattatgttgtcattttgtagttcttcacaaaatctcaacaggtaccaaacacattgtttccacaagacatattttagtcacaacaaatctatattattattaatcactaaaactatactgaggctcagatgcttttactagctcttgctagtatgtgatgtaggtctctttcgacatcattccatcaaaatcatatgattagcccataccaaacatttctataccattcagagaccagaatagtcttttctaatagaaaaaaggaaaatagagtgggccgacgacgacacaaattactgcgtggaccagaaaatagtgagacacggaagacaaaagaagtaaaagaggcaaggactacggcccacatgagattcggccccgccacctccggcaaccagcggccgatccaacggcagtgcatcctcaacggcgcgcgcgcgcgcgcgcgcgcacaacctcgtatatatcgccgcgcggaagcggcgcgaccgaggaagccttgtcctcgacaccccctacacaggtgtcgcgctgcccccgacacgagtcccgcatgcgtcccacgcggccgcgccagatcccgcctccgcgcgttgccacgccctctataaacacccagctctctccctcgccctcatctatcgcactcgtagtcgtagctcaagcatcagcggcaggagctctgggcagcgtgcgcacgtggggtacctagctcgctctgctagcctacc

SEQ ID NO: 2 - DNA, 1299 bp, Zea mays
  promoter (1)..(1299): Maize PEP carboxylase
tctagagatgtaatggtgttaggacacgtggttagctactaatataaatgtaaggtcaaaattcgatggtttattttctattttcaattacctagcattatctcatttctaattgtgtgataacaaatgcattagaccataattctgtaaatacgtacatttaagcacacagtctatattttaaaattcttctttttgtgtggatatcccaacccaaatccacctctctcctcaatccgtgtatcttcaccgctgccaagtgccaacaacacatcgcatcgtgcaaatctttgttggtttgtgcacggtcggcgccaatggaggagacacctgtacggtgcccttggtagaacaacatccttatccctatatgtatggtgcccttcgtagaatggcaccccttatccctacaatagccatgtatgcataccaagaattaaatatactttttcttgaaccacaataatttattatagcggcacttcttgttctggttgaacacttatttggaacaataaaatcccgagttcctaaccacaggttcactttttttccttatcctcctaggaaactaaattttaaattcataaatttaattgaaatgttaatgaaaacaaaaaaattatctacaaagacgactcttagccacagccgcctcactgcaccctcaaccacatcctgcaaacagacaccctcgccacatccctccagattcttccctccgatgcagcctacttgctaacagacgccctctccacatcctgcaaagcattcctccaaattcttgcgatcccccgaatccagcattaactgctaagggacgccctctccacatcctgctacccaattagccaacggaataacacaagaaggcaggtgagcagtgacaaagcacgtcaacagcaccgagccaagccaaaaaggagcaaggaggagcaagcccaagccgcagccgcagctctccaggtccccttgcgattgccgccagcagtagcagacacccctctccacatcccctccggccgctaacagcagcaagccaagccaaaaagaagcctcagccacagccggttccgttgcggttaccgccgatcacatgcccaaggccgcgcctttccaaacgccgagggccgcccgttcccgtgcacagccacacacacacccgcccgccaacgactccccatccctatttgaacccacccgcgcactgcattgatcaccaatcgcatcgcagcagcacgagcagcacgccgtgccgctccaaccgtctcgcttccctgcttagcttcccgccgcgcc

SEQ ID NO: 3 - DNA, 1992 bp, Zea mays
  promoter (1)..(1992): Maize ubiquitin 1 (with intron)
ctgcagtgcagcgtgacccggtcgtgcccctctctagagataatgagcattgcatgtctaagttataaaaaattaccacatattttttttgtcacacttgtttgaagtgcagtttatctatctttatacatatatttaaactttactctacgaataatataatctatagtactacaataatatcagtgttttagagaatcatataaatgaacagttagacatggtctaaaggacaattgagtattttgacaacaggactctacagttttatctttttagtgtgcatgtgttctcctttttttttgcaaatagcttcacctatataatacttcatccattttattagtacatccatttagggtttagggttaatggtttttatagactaatttttttagtacatctattttattctattttagcctctaaattaagaaaactaaaactctattttagtttttttatttaataatttagatataaaatagaataaaataaagtgactaaaaattaaacaaataccctttaagaaattaaaaaaactaaggaaacatttttcttgtttcgagtagataatgccagcctgttaaacgccgtcgacgagtctaacggacaccaaccagcgaaccagcagcgtcgcgtcgggccaagcgaagcagacggcacggcatctctgtcgctgcctctggacccctctcgagagttccgctccaccgttggacttgctccgctgtcggcatccagaaattgcgtggcggagcggcagacgtgagccggcacggcaggcggcctcctcctcctctcacggcacggcagctacgggggattcctttcccaccgctccttcgctttcccttcctcgcccgccgtaataaatagacaccccctccacaccctctttccccaacctcgtgttgttcggagcgcacacacacacaaccagatctcccccaaatccacccgtcggcacctccgcttcaaggtacgccgctcgtcctccccccccccccctctctaccttctctagatcggcgttccggtccatggttagggcccggtagttctacttctgttcatgtttgtgttagatccgtgtttgtgttagatccgtgctgctagcgttcgtacacggatgcgacctgtacgtcagacacgttctgattgctaacttgccagtgtttctctttggggaatcctgggatggctctagccgttccgcagacgggatcgatttcatgattttttttgtttcgttgcatagggtttggtttgcccttttcctttatttcaatatatgccgtgcacttgtttgtcgggtcatcttttcatgcttttttttgtcttggttgtgatgatgtggtctggttgggcggtcgttctagatcggagtagaattctgtttcaaactacctggtggatttattaattttggatctgtatgtgtgtgccatacatattcatagttacgaattgaagatgatggatggaaatatcgatctaggataggtatacatgttgatgcgggttttactgatgcatatacagagatgctttttgttcgcttggttgtgatgatgtggtgtggttgggcggtcgttcattcgttctagatcggagtagaatactgtttcaaactacctggtgtatttattaattttggaactgtatgtgtgtgtcatacatcttcatagttacgagtttaagatggatggaaatatcgatctaggataggtatacatgttgatgtgggttttactgatgcatatacatgatggcatatgcagcatctattcatatgctctaaccttgagtacctatctattataataaacaagtatgttttataattattttgatcttgatatacttggatgatggcatatgcagcagctatatgtggatttttttagccctgccttcatacgctatttatttgcttggtactgtttcttttgtcgatgctcaccctgttgtttggtgttacttctgcag

SEQ ID NO: 4 - DNA, 1363 bp, Zea mays
  promoter (1)..(1363): Maize gamma zein 27
aaagtaatcatattattttatgtgtgaatcttctttactttttcatttgattatgattatgaaggtatgaccttcataaccttcgtccgaaatccattatatccaaaggaaaataatgcttcgaaggacgaaggattttgatatttaacattttatgttgccttgttcttaattcatagcatttgagaacaagtccccaacaccaatctttatctttactatattaaagcaccagttcaacgatcgtctcgtgtcaatattattaaaaaactcctacatttctttataatcaacccgcactcttataatctcttctcttactactataataagagagtttatgtacaaaataaggtgaaattatgtataagtgttctggaccttggttgttggctcatattcacacaacctaatcaatagaaaacatatgttttattaaaacaaaatttatcatatatatatatatatatatatatatatatatatatatatataatataaaccgtagcaatgcacaggcatatgactagtggcaacttaataccatgtgtgtattaagatgaataagaggtatccaaataaataacttgttcgcttacgtctggatcgaaaggggttggaaacgattaaatctcttcctagtcaaaattaaatagaaggagatttaatcgatttctcccaatccccttcgatccaggtgcaaccgaataagtccttaaatgttgaggaacacgaaacaaccatgcattggcatgtaaagctccaagaattcgttgtatccttaacaactcacagaacatcaaccaaaattgcacgtcaagggtattgggtaagaaacaatcaaacaaatcctctctgtgtgcaaagaaacacggtgagtcatgccgagatcatactcatctgatatacatgcttacagctcacaagacattacaaacaactcatattgcattacaaagatcgtttcatgaaaaataaaataggccggaacaggacaaaaatccttgacgtgtaaagtaaatttacaacaaaaaaaaagccatatgtcaagctaaatctaattcgttttacgtagatcaacaacctgtagaaggcaacaaaactgagccacgcagaagtacagaatgattccagatgaaccatcgacgtgctacgtaaagagagtgacgagtcatatacatttggcaagaaaccatgaagctgcctacagccgtctcggtggcataagaacacaagaaattgtgttaattaatcaaagctataaataacgctcgcatgcctgtgcacttctccatcaccaccactgggtcttcagaccattagctttatctactccagagcgcagaagaacccgatcgacacc

SEQ ID NO: 5 - DNA, 2071 bp, Oryza sativa
  promoter (1)..(2071): Rice glutelin 1
tccatgctgtcctactacttgcttcatccccttctacattttgttctggtttttggcctgcatttcggatcatgatgtatgtgatttccaatctgctgcaatatgaatggagactctgtgctaaccatcaacaacatgaaatgcttatgaggcctttgctgagcagccaatcttgcctgtgtttatgtcttcacaggccgaattcctctgttttgtttttcaccctcaatatttggaaacatttatctaggttgtttgtgtccaggcctataaatcatacatgatgttgtcgtattggatgtgaatgtggtggcgtgttcagtgccttggatttgagtttgatgagagttgcttctgggtcaccactcaccattatcgatgctcctcttcagcataaggtaaaagtcttccctgtttacgttattttacccactatggttgcttgggttggttttttcctgattgcttatgccatggaaagtcatttgatatgttgaacttgaattaactgtagaattgtatacatgttccatttgtgttgtacttccttcttttctattagtagcctcagatgagtgtgaaaaaaacagattatataacttgccctataaatcatttgaaaaaaatattgtacagtgagaaattgatatatagtgaatttttaagagcatgttttcctaaagaagtatatattttctatgtacaaaggccattgaagtaattgtagatacaggataatgtagactttttggacttacactgctacctttaagtaacaatcatgagcaatagtgttgcaatgatatttaggctgcattcgtttactctcttgatttccatgagcacgcttcccaaactgttaaactctgtgttttttgccaaaaaaaaatgcataggaaagttgcttttaaaaaatcatatcaatccattttttaagttatagctaatacttaattaatcatgcgctaataagtcactctgtttttcgtactagagagattgttttgaaccagcactcaagaacacagccttaacccagccaaataatgctacaacctaccagtccacacctcttgtaaagcatttgttgcatggaaaagctaagatgacagcaacctgttcaggaaaacaactgacaaggtcatagggagagggagcttttggaaaggtgccgtgcagttcaaacaattagttagcagtagggtgttggtttttgctcacagcaataagaagttaatcatggtgtaggcaacccaaataaaacaccaaaatatgcacaaggcagtttgttgtattctgtagtacagacaaaactaaaagtaatgaaagaagatgtggtgttagaaaaggaaacaatatcatgagtaatgtgtgggcattatgggaccacgaaataaaaagaacattttgatgagtcgtgtatcctcgatgagcctcaaaagttctctcaccccggataagaaacccttaagcaatgtgcaaagtttgcattctccactgacataatgcaaaataagatatcatcgatgacatagcaactcatgcatcatatcatgcctctctcaacctattcattcctactcatctacataagtatcttcagctaaatgttagaacataaacccataagtcacgtttgatgagtattaggcgtgacacatgacaaatcacagactcaagcaagataaagcaaaatgatgtgtacataaaactccagagctatatgtcatattgcaaaaagaggagagcttataagacaaggcatgactcacaaaaattcatttgcctttcgtgtcaaaaagaggagggctttacattatccatgtcatattgcaaaagaaagagagaaagaacaacacaatgctgcgtcaattatacatatctgtatgtccatcattattcatccacctttcgtgtaccacacttcatatatcatgagtcacttcatgtctggacattaacaaactctatcttaacatttagatgcaagagcctttatctcactataaatgcacgatgatttctcattgtttctcacaaaaagcattcagttcattagtcctacaacaac

SEQ ID NO: 6 - DNA, 1474 bp, Oryza sativa
  promoter (1)..(1474): Rice glutelin B4
tacagggttccttgcgtgaagaagggtggcctgcggttcaccattaacggtcacgactacttccagctagtactggtgaccaacgtcgcggcggcagggtcaatcaagtccatggaggttatgggttccaacacagcggattggatgccgatggcacgtaactggggcgcccaatggcactcactggcctacctcaccggtcaaggtctatcctttagggtcaccaacacagatgaccaaacgctcgtcttcaccaacgtcgtgccaccaggatggaagtttggccagacatttgcaagcaagctgcagttcaagtgagaggagaagcctgaattgataccggagcgtttcttttgggagtaacatctctggttgcctagcaaacatatgattgtatataagtttcgttgtgcgtttattctttcggtgtgtaaaataacatacatgctttcctgatattttcttgtatatatgtacacacacacgacaaatccttccatttctattattattgaacaatttaattgcgagggcgagtacttgtctgtttaccttttttttttcagatggcattttatagtttaacctttcatggaccggcagtagttctaaccatgaatgaaaagaaatcatagtccacaccacgcagggacattgtggtcattttagacaagacgatttgattaatgtcttgtatgatatggtcgacagtgaggactaacaaacatatggcatattttattaccggcgagttaaataaatttatgtcacagtaataaactgcctaataaatgcacgccagaaaatataatgataaaaaaaagaaaagatacataagtccattgcttctacttttttaaaaattaaatccaacattttctattttttggtataaacttggaagtactagttggatatgcaaaatcatctaacctccatatatttcatcaatttgtttactttacatatgggagaggatagtatgtcaaagaaaatgacaacaagcttacaagtttcttattttaaaagttccgctaacttatcaagcatagtgtgccacgcaaaactgacaacaaaccaacaaatttaaggagcgcctaacttatcatctatgacataccgcacaaaatgataacatactagagaaactttattgcacaaaaggaaatttatccataaggcaaaggaacatcttaaggctttggatatacatttaccaacaagcattgtttgtattacccctaaagcgcaagacatgtcatccatgagtcatagtgtgtatatctcaacattgcaaagctaccttttttctattatacttttcgcattataggctagatattatctatacatgtcaacaaactctatccctacgtcatatctgaagattcttttcttcactatataagttggcttccctgtcattgaactcacatcaaccagcccaagtttccaataacatcctcaaatagct

SEQ ID NO: 7 - DNA, 57 bp, Zea mays
  sig_peptide (1)..(57): Maize gamma zein 27_Coding sequence
atgcgcgtgctgctcgtggccctggccctgctggctcttgctgccagcgccacctct

SEQ ID NO: 8 - protein, 19 aa, Zea mays
  SIGNAL (1)..(19): Maize gamma zein 27_polypeptide
MRVLLVALALLALAASATS

SEQ ID NO: 9 - DNA, 72 bp, Oryza sativa
  sig_peptide (1)..(72): Rice glutelin B4_coding sequence
atggccaccatcgctttctcccgcttgtccatctacttctgcgtgcttctcctgtgccacggctccatggcc

SEQ ID NO: 10 - protein, 24 aa, Oryza sativa
  SIGNAL (1)..(24): Rice glutelin B4_polypeptide
MATIAFSRLSIYFCVLLLCHGSMA

SEQ ID NO: 11 - DNA, 1581 bp, Artificial Sequence
  Synthetic construct, PAPhy_b1 coding seq
accgcggttcccgccgagccggcgtcgacgctgtccgggccgtcgcggccggtgacggtggcgatcggagacaggggccacgcggtggacctgccggacacggacccgcgggtgcagcgccgcgtcacgggctgggcgcccgagcagatcgccgtcgcgctctccgcctcgcccacctccgcctgggtctcctggatcacaggggactaccagatgggcggcgccgtggagccgctggaccccggcgcggtgggcagcgtcgtgcggtacggcctcgccgccgacgccctcgaccacgaggccaccggggagtcgctcgtgtacagccagctgtacccgttcgagggcctccagaactacacctccggcatcatccaccacgtccgcctccagggcctggagcctgggaccaggtacttgtaccggtgcggcgacccggccatcccggacgccatgagcgacgtgcacgcgttccgcacgatgccggccgtcgggccggggagctacccagggcggatcgccgtggtcggggacctcgggctcacctacaacaccacctcgacggtggaccacttggtgcgcaaccgccccgacctggtgctcctcctcggcgacgtctgctacgccaacctgtacctgaccaacggcaccggggcggactgctactcctgcgccttcgccaagtccacgcccatccacgagacgtaccagccgcgctgggattactggggaaggtacatggagcccgtgacgtcgagcatcccgatgatggtggtggagggcaaccatgagatcgagcagcagatccacaacaggacgttcgcggcctacagctcgcggttcgcgttcccgtcggaggagagcgggtcctcctcgccgttctactactcgttcgacgccggcggcatccacttcgtcatgcttgcgtcctacgccgactacagcagatcaggtgcgcagtacaagtggctggaggcggacctggagaaggtggacaggtcggtgacgccatggctgatcgcgggctggcacgcgccctggtacaccacctacaaggctcactacagggaagccgagtgcatgagggtggagatggaggagctcctctacgcctacggtgtcgacgtcgtcttcaccggccacgtgcacgcgtacgagcggtcgaaccgggtgttcaactacacgctggacgcgtgcggccccgtgcacatctcggtgggcgacggcggcaaccgcgagaagatggcgacggcgcacgcggacgaggcgggccactgcccggacccggcgtcgacgccggaccccttcatggggggccgcctctgcgccgccaacttcacgtcgggccccgccgcgggccgcttctgctgggaccgccagccggagtacagcgcgtacagggagagcagcttcgggcacggcgtcctggaggtcaggaacgacacgcacgcgctctggcggtggcaccgcaaccaggacctccatgccgccgccgccgccaacgtcgccgccgacgaggtctacatcgtcagggagcccgacaagtgcctcgccaagacggccagattgttggcctattga

SEQ ID NO: 12 - protein, 526 aa, Artificial Sequence
  Synthetic construct, PAPhy_b1 polypeptide
TAVPAEPASTLSGPSRPVTVAIGDRGHAVDLPDTDPRVQRRVTGWAPEQIAVALSASPTSAWVSWITGDYQMGGAVEPLDPGAVGSVVRYGLAADALDHEATGESLVYSQLYPFEGLQNYTSGIIHHVRLQGLEPGTRYLYRCGDPAIPDAMSDVHAFRTMPAVGPGSYPGRIAVVGDLGLTYNTTSTVDHLVRNRPDLVLLLGDVCYANLYLTNGTGADCYSCAFAKSTPIHETYQPRWDYWGRYMEPVTSSIPMMVVEGNHEIEQQIHNRTFAAYSSRFAFPSEESGSSSPFYYSFDAGGIHFVMLASYADYSRSGAQYKWLEADLEKVDRSVTPWLIAGWHAPWYTTYKAHYREAECMRVEMEELLYAYGVDVVFTGHVHAYERSNRVFNYTLDACGPVHISVGDGGNREKMATAHADEAGHCPDPASTPDPFMGGRLCAANFTSGPAAGRFCWDRQPEYSAYRESSFGHGVLEVRNDTHALWRWHRNQDLHAAAAANVAADEVYIVREPDKCLAKTARLLAY

SEQ ID NO: 13 - DNA, 1566 bp, Artificial Sequence
  Synthetic construct, PAPhy_b2 coding seq
gagccggcgtcgacgctgtccgggccgtcgcggccggtgacggtggcgatcggagacaggggccacgcggtggacctgccggacacggacccgcgggtgcagcgccgcgtcacgggctgggcgcccgagcagatcgccgtcgcgctctccgcctcgcccacctccgcctgggtctcctggatcacaggggactaccagatgggcggcgccgtggagccgctggaccccggcgcggtgggcagcgtcgtgcggtacggcctcgccgccgacgccctcgaccacgaggccaccggggagtcgctcgtgtacagccagctgtacccgttcgagggcctccagaactacacctccggcatcatccaccacgtccgcctccagggcctggagcctgggaccaggtacttgtaccggtgcggcgacccggccatcccggacgccatgagcgacgtgcacgcgttccgcacgatgccggccgtcgggccggggagctacccggggcggatcgccgtggtcggggacctcgggctcacctacaacaccacctcgacggtggaccacttggtgcgcaaccgccccgacctggtgctcctcctcggcgacgtctgctacgccaacctgtacctgaccaacggcaccggggcggactgctactcctgcgccttcgccaagtccacgcccatccacgagacgtaccagccgcgctgggattactggggaaggtacatggagcccgtgacgtcgagcatcccgatgatggtggtggagggcaaccatgagatcgagcagcagatccacaacaggacgttcgcggcctacagctcgcggttcgcgttcccgtcggaggagagcgggtcctcctcgccgttctactactcgttcgacgccggcggcatccacttcgtcatgcttgcgtcctacgccgactacagcagatcaggtgcgcagtacaagtggctggaggcggacctggagaaggtggacaggtcggtgacgccatggctgatcgcgggctggcacgcgccctggtacaccacctacaaggctcactacagggaagccgagtgcatgagggtggagatggaggagctcctctacgcctacggtgtcgacgtcgtcttcaccggccacgtgcacgcgtacgagcggtcgaaccgggtgttcaactacacgctggacgcgtgcggccccgtgcacatctcggtgggcgacggcggcaaccgcgagaagatggcgacggcgcacgcggacgaggccggccactgcccggacccggcgtcgacgccggaccccttcatggggggccgcctctgcgccgccaacttcacgtcgggccccgccgcgggccgcttctgctgggaccgccagccggagtacagcgcgtacagggagagcagcttcgggcacggcgtcctggaggtcaggaacgacacgcacgcgctctggcggtggcaccgcaaccaggacctccatgccgccgccgccgccaacgtcgccgccgacgaggtctacatcgtcagggagcccgacaagtgcctcgccaagacggccagattgttggcctattga

SEQ ID NO: 14 - protein, 521 aa, Artificial Sequence
  Synthetic construct,  PAPhy_b2 polypeptide
EPASTLSGPSRPVTVAIGDRGHAVDLPDTDPRVQRRVTGWAPEQIAVALSASPTSAWVSWITGDYQMGGAVEPLDPGAVGSVVRYGLAADALDHEATGESLVYSQLYPFEGLQNYTSGIIHHVRLQGLEPGTRYLYRCGDPAIPDAMSDVHAFRTMPAVGPGSYPGRIAVVGDLGLTYNTTSTVDHLVRNRPDLVLLLGDVCYANLYLTNGTGADCYSCAFAKSTPIHETYQPRWDYWGRYMEPVTSSIPMMVVEGNHEIEQQIHNRTFAAYSSRFAFPSEESGSSSPFYYSFDAGGIHFVMLASYADYSRSGAQYKWLEADLEKVDRSVTPWLIAGWHAPWYTTYKAHYREAECMRVEMEELLYAYGVDVVFTGHVHAYERSNRVFNYTLDACGPVHISVGDGGNREKMATAHADEAGHCPDPASTPDPFMGGRLCAANFTSGPAAGRFCWDRQPEYSAYRESSFGHGVLEVRNDTHALWRWHRNQDLHAAAAANVAADEVYIVREPDKCLAKTARLLAY

SEQ ID NO: 15 - DNA, 1236 bp, Artificial Sequence
  Synthetic construct, Phy-02 coding seq
gcccagagcgagccggagctgaagctggagagcgtggtgatcgtgagcaggcacggcgtgagggccccgaccaagttcacccagctgatgcaggacgtgaccccggacgcgttctacacctggccggtgaagctgggcgagctgaccccgaggggcggcgagctgatcgcctacctgggccactactggaggcagaggctggtggccgacggcctgctgccgaagaagggctgcccgcagagcggccaggtggccatcatcgccgacgtggacgagaggaccaggaagaccggtgaggccttcgccgccggcctggccccggactgcgccatcaccgtgcacacccaggccgacaccagcagcccggacccgctgttcaacccgctgaagaccggcgtgtgccagctggacgtggcccaggtgaccgacgccatcctggagagggccggcggcagcatcgccgacttcaccggccactaccagaccgccttcagggagctggagagggtgctgaacttcccgcagagcaacctggccctgaagagggagaagcaggacgagagcgccagcctgacccaggccctgccgagcgagctgaaggtgagcgccgacaacgtgagcctgaccggcgcctggagcctggccagcatgctgaccgagattttcctgctgcagcaggcccagggcatgccggagccgggctggggcaggatcaccgacagccaccagtggaacaccctgctgagcctgcacaacgcccagttcgacctgctgcagaggaccccggaggtggccaggagcagggccaccccgctgctggacctgatcaagaccgccctgaccccgcacccgccgcagaagcaggcctacggcgtgaccctgccgaccagcgtgctgttcatcgccggccacgacaccaacctggccaacctgggcggcgccctcgagctgcagtggaccctgccgggccagccggacaacaccccgccgggcggcgagctggtgttcgagaggtggaggaggctgagcgacaacagccagtggattcaggtgagcctggtgttccagaccctgcagcagatgagggacaagaccccgctgttcctgaacaccccgccgggcgaggtgaagctgaccctggccggctgcgaggagaggaacgcccagggcatgtgcagcctggccggcttcacccagatcgtgaacgaggccaggattccggcctgcagcctgtga

SEQ ID NO: 16 - protein, 411 aa, Artificial Sequence
  Synthetic construct, Phy-02 polypetide
AQSEPELKLESVVIVSRHGVRAPTKFTQLMQDVTPDAFYTWPVKLGELTPRGGELIAYLGHYWRQRLVADGLLPKKGCPQSGQVAIIADVDERTRKTGEAFAAGLAPDCAITVHTQADTSSPDPLFNPLKTGVCQLDVAQVTDAILERAGGSIADFTGHYQTAFRELERVLNFPQSNLALKREKQDESASLTQALPSELKVSADNVSLTGAWSLASMLTEIFLLQQAQGMPEPGWGRITDSHQWNTLLSLHNAQFDLLQRTPEVARSRATPLLDLIKTALTPHPPQKQAYGVTLPTSVLFIAGHDTNLANLGGALELQWTLPGQPDNTPPGGELVFERWRRLSDNSQWIQVSLVFQTLQQMRDKTPLFLNTPPGEVKLTLAGCEERNAQGMCSLAGFTQIVNEARIPACSL

SEQ ID NO: 17 - DNA, 1239 bp, Artificial Sequence
  Synthetic construct, Phy-02opt coding seq
gctgcgcagtccgagccggagctgaagctggagtccgtggtgatcgtgtcgcgccacggggtgcgcgccccgaccaagttcacgcagctcatgcaggacgtgaccccggacgccttctacacctggccggtgaagctcggcgagctgaccccgcgcggcggcgagctgatcgcctacctcggccactactggcgccagcgcctcgtggccgacggcctcctcccgaagaagggctgcccgcagtccggccaggtggcgatcatcgccgacgtggacgagcgcacccgcaagacgggcgaggccttcgccgccggcctcgccccggactgcgccatcaccgtgcacacccaggccgacacctcctccccggacccgctcttcaacccgctcaagaccggcgtgtgccagctcgacgtggcccaggtgaccgacgccatcctggagcgcgccggcggctccatcgccgacttcaccggccactaccagaccgccttccgcgagctggagcgcgtgctcaacttcccgcagtcgaacctcgccctcaagcgcgagaagcaggacgagtccgcctccctcacccaggccctcccgtccgagctgaaggtgtccgccgacaacgtgtccctcaccggcgcctggtccctcgcctccatgctcaccgaaatcttcctcctccagcaggcccagggcatgccggagccgggctggggccgcatcaccgactcccaccagtggaacaccctcctctccctccacaacgcccagttcgacctcctccagcgcaccccggaggtggcccgctcccgcgccaccccgctcctcgacctcatcaagaccgccctcaccccgcacccgccgcagaagcaggcctacggcgtgaccctcccgacctcggtgctcttcatcgccggccacgacaccaacctcgccaacctcggcggcgccctggagctgcagtggaccctcccgggccagccggacaacaccccgccgggcggcgagctggtgttcgagcgctggcgccgcctctccgacaactcccagtggattcaggtgtccctcgtgttccagaccctccagcagatgcgcgacaagaccccgctcttcctcaacaccccgccgggcgaggtgaagctcaccctggccggctgcgaggagcgcaacgcgcagggcatgtgctccctcgccggcttcacccagatcgtgaacgaggcccgcatcccggcctgctccctctaa

SEQ ID NO: 18 - protein, 412 aa, Artificial Sequence
  Synthetic construct, Phy-02opt polypetide
AAQSEPELKLESVVIVSRHGVRAPTKFTQLMQDVTPDAFYTWPVKLGELTPRGGELIAYLGHYWRQRLVADGLLPKKGCPQSGQVAIIADVDERTRKTGEAFAAGLAPDCAITVHTQADTSSPDPLFNPLKTGVCQLDVAQVTDAILERAGGSIADFTGHYQTAFRELERVLNFPQSNLALKREKQDESASLTQALPSELKVSADNVSLTGAWSLASMLTEIFLLQQAQGMPEPGWGRITDSHQWNTLLSLHNAQFDLLQRTPEVARSRATPLLDLIKTALTPHPPQKQAYGVTLPTSVLFIAGHDTNLANLGGALELQWTLPGQPDNTPPGGELVFERWRRLSDNSQWIQVSLVFQTLQQMRDKTPLFLNTPPGEVKLTLAGCEERNAQGMCSLAGFTQIVNEARIPACSL

SEQ ID NO: 19 - DNA, 1236 bp, Artificial Sequence
  Synthetic construct, Phy-03 coding seq
gcccagagcgagccggagctgaagctggagagcgtggtgatcgtgagcaggcacggcgtgagggccccgaccaaggccacccagctgatgcaggacgtgaccccggacgcgttctacacctggccggtgaagctgggcgagctgaccccgaggggcggcgagctgatcgcctacctgggccactactggaggcagaggctggtggccgacggcctgctgccgaagaagggctgcccgcagagcggccaggtggccatcatcgccgacgtggacgagaggaccaggaagaccggcgaggccttcgccgccggcctggccccggactgcgccatcaccgtgcacacccaggccgacaccagcagcccggacccgctgttcaacccgctgaagaccggcgtgtgccagctggacaacgcccaggtgaccgacgccatcctggagagggccggcggcagcatcgccgacttcaccggccactaccagaccgccttcagggagctggagagggtgctgaacttcccgcagagcaacctgtgcctgaagagggagaagcaggacgagagctgcagcctgacccaggccctgccgagcgagctgaaggtgagcgccgacaacgtgagcctgaccggcgccgtgagcctggccagcatgctgaccgagattttcctgctgcagcaggcccagggcatgccggagccgggctggggcaggatcaccgacagccaccagtggaacaccctgctgagcctgcacaacgcccagttcgacctgctgcagaggaccccggaggtggccaggagcagggccaccccgctgctggacctgatcaagaccgccctgaccccgcacccgccgcagaagcaggcctacggcgtgaccctgccgaccagcgtgctgttcatcgccggccacgacaccaacctggccaacctgggcggcgccctcgagctgcagtggaccctgccgggccagccggacaacaccccgccgggcggcgagctggtgttcgagaggtggaggaggctgagcgacaacagccagtggattcaggtgagcctggtgttccagaccctgcagcagatgagggacaagaccccgctgtccctgaacaccccgccgggcgaggtgaagctgaccctggccggctgcgaggagaggaacgcccagggcatgtgcagcctggccggcttcacccagatcgtgaacgaggccaggattccggcctgcagcctgtga

SEQ ID NO: 20 - protein, 411 aa, Artificial Sequence
  Synthetic construct, Phy-03 polypetide
AQSEPELKLESVVIVSRHGVRAPTKATQLMQDVTPDAFYTWPVKLGELTPRGGELIAYLGHYWRQRLVADGLLPKKGCPQSGQVAIIADVDERTRKTGEAFAAGLAPDCAITVHTQADTSSPDPLFNPLKTGVCQLDNAQVTDAILERAGGSIADFTGHYQTAFRELERVLNFPQSNLCLKREKQDESCSLTQALPSELKVSADNVSLTGAVSLASMLTEIFLLQQAQGMPEPGWGRITDSHQWNTLLSLHNAQFDLLQRTPEVARSRATPLLDLIKTALTPHPPQKQAYGVTLPTSVLFIAGHDTNLANLGGALELQWTLPGQPDNTPPGGELVFERWRRLSDNSQWIQVSLVFQTLQQMRDKTPLSLNTPPGEVKLTLAGCEERNAQGMCSLAGFTQIVNEARIPACSL

SEQ ID NO: 21 - DNA, 1239 bp, Artificial Sequence
  Synthetic construct, PhyNov9x coding seq
gctgcgcagtccgagccggagctgaagctggagtccgtggtgatcgtgtcgcgccacggggtgcgcgccccgaccaaggccacgcagctcatgcaggacgtgaccccggacgcctggccgacctggccggtgaagctcggcgagctgaccccgcgcggcggcgagctgatcgcctacctcggccactactggcgccagcgcctcgtggccgacggcctcctcccgaagtgcggctgcccgcagtccggccaggtggcgatcatcgccgacgtggacgagcgcacccgcaagacgggcgaggccttcgccgccggcctcgccccggactgcgccatcaccgtgcacacccaggccgacacctcctccccggacccgctcttcaacccgctcaagaccggcgtgtgccagctcgacaacgccaacgtgaccgacgccatcctggagcgcgccggcggctccatcgccgacttcaccggccactaccagaccgccttccgcgagctggagcgcgtgctcaacttcccgcagtcgaacctctgcctcaagcgcgagaagcaggacgagtcctgctccctcacccaggccctcccgtccgagctgaaggtgtccgccgactgcgtgtccctcaccggcgccgtgtccctcgcctccatgctcaccgaaatcttcctcctccagcaggcccagggcatgccggagccgggctggggccgcatcaccgactcccaccagtggaacaccctcctctccctccacaacgcccagttcgacctcctccagcgcaccccggaggtggcccgctcccgcgccaccccgctcctcgacctcatcaagaccgccctcaccccgcacccgccgcagaagcaggcctacggcgtgaccctcccgacctcggtgctcttcatcgccggccacgacaccaacctcgccaacctcggcggcgccctggagctgaactggaccctcccgggccagccggacaacaccccgccgggcggcgagctggtgttcgagcgctggcgccgcctctccgacaactcccagtggattcaggtgtccctcgtgttccagaccctccagcagatgcgcgacaagaccccgctctccctcaacaccccgccgggcgaggtgaagctcaccctggccggctgcgaggagcgcaacgcgcagggcatgtgctccctcgccggcttcacccagatcgtgaacgaggcccgcatcccggcctgctccctctaa

SEQ ID NO: 22 - protein, 412 aa, Artificial Sequence
  Synthetic construct, PhyNov9X polypeptide
AAQSEPELKLESVVIVSRHGVRAPTKATQLMQDVTPDAWPTWPVKLGELTPRGGELIAYLGHYWRQRLVADGLLPKCGCPQSGQVAIIADVDERTRKTGEAFAAGLAPDCAITVHTQADTSSPDPLFNPLKTGVCQLDNANVTDAILERAGGSIADFTGHYQTAFRELERVLNFPQSNLCLKREKQDESCSLTQALPSELKVSADCVSLTGAVSLASMLTEIFLLQQAQGMPEPGWGRITDSHQWNTLLSLHNAQFDLLQRTPEVARSRATPLLDLIKTALTPHPPQKQAYGVTLPTSVLFIAGHDTNLANLGGALELNWTLPGQPDNTPPGGELVFERWRRLSDNSQWIQVSLVFQTLQQMRDKTPLSLNTPPGEVKLTLAGCEERNAQGMCSLAGFTQIVNEARIPACSL

SEQ ID NO: 23 - DNA, 1233 bp, Artificial Sequence
  Synthetic construct, PhyQB coding seq
cagtcggagcctgagctgaagctggagtcggtcgtcatcgtttcccggcacggcgttagggccccaaccaagttcacacagctgatgcaggacgtgacccccgatgcttggccaacctggcctgtcaagctcggcgagctgacccccaggggcggggagctcatcgcgtacctggggcactactggcgccagcggctggtcgctgacggcctcctgccaaaggttggctgccctcagtctgggcaggtggctatcattgccgacgtcgatgagcgcaccaggaagacgggcgaggccttcgccgcggggctcgccccagactgcgctatcaccgtgcaccatcaggcggacacgtccagcccagatcctctcttcaacccgctgaagaccggcgtctgccagctggacgtggcgaatgtccgcagggctatcctggagagggccggcgggtccattgccgatttcacaaggcattaccagactgcgttcagggagctggagcgggtgctgaacttcccgcagagcaatctctgcctgaagcgcgagaagcaggacgagtcgtgctctctcacgcaggccctgccctctgagctcaaggtctcagcggacgatgtttccctgacaggcgcctggtcactggcgtccatgctcactgagattttcctcctgcagcaggctcaggggatgccggagccaggctgggggcggattacagacagccaccagtggaacactctcctgtcgctccataatgcggttttcgatctcctgcagaggacccccgaggtggctcggtcgcgcgccacgcccctcctggacctgatcaagacagctctcactccacacccgccccagaagcaggcctacggcgttaccctgcctacgtccgtgctcttcattgccggccatgataccaacctcgctaatctgggcggggccctggagctgaactggaccctgccgggccagcccgacaattacccacctggcggggagctggtgttcgagaggtggaggcgcctcagcgataactcgcagtggattcaggtgtccctcgtgttccagacactccagcagatgcgggacaagacaccgctctcactgaacactccgcccggcgaggtcaagctcacgctggccgggtgcgaggagaggaacgctcagggcatgtgctccctggctgggttcacacagattgtcaacgaggcccgcatccccgcttgctctctctaa

SEQ ID NO: 24 - protein, 410 aa, Artificial Sequence
  Synthetic construct, PhyQB polypeptide
QSEPELKLESVVIVSRHGVRAPTKFTQLMQDVTPDAWPTWPVKLGELTPRGGELIAYLGHYWRQRLVADGLLPKVGCPQSGQVAIIADVDERTRKTGEAFAAGLAPDCAITVHHQADTSSPDPLFNPLKTGVCQLDVANVRRAILERAGGSIADFTRHYQTAFRELERVLNFPQSNLCLKREKQDESCSLTQALPSELKVSADDVSLTGAWSLASMLTEIFLLQQAQGMPEPGWGRITDSHQWNTLLSLHNAVFDLLQRTPEVARSRATPLLDLIKTALTPHPPQKQAYGVTLPTSVLFIAGHDTNLANLGGALELNWTLPGQPDNYPPGGELVFERWRRLSDNSQWIQVSLVFQTLQQMRDKTPLSLNTPPGEVKLTLAGCEERNAQGMCSLAGFTQIVNEARIPACSL

SEQ ID NO: 25 - DNA, 1086 bp, Artificial Sequence
  Synthetic construct, ZmPhy1 coding seq
gccgggatgactgatctgctgatgctgaccgacaagtcgcagctgcaggcgctagcgatgctgctgcggaacaacgaggagctcatgatgagccaagcgatcaagtcggagacggagcgcgttgagtacctcaagacggtgagcgactgctacacgcggacaatgaagctccttgacgactccatggcggccaggatcacgtacgagcgttcgggcggaacgaggagcctcgtcgcgcgggacatggacgactacgtcgtctacggcctcaacgcgtgcttgcagaacgtccgcaactgctgcgtgcgtctggacgccatcgacaagctgcgggcgcactacgacgccctcgccgacgccgtcgccgaaccggccgccaacgtcgagggcctcgccgcggaggcgtccgagtacaaggccgccatgtggcagtactgctacaaccagcggagcgcctccgcgcgggcgcactcccgcgcctactcccaggcgctcaagctggagggcatcgacttcgccgagcttgtgcggaggcaccagctccggctcgggtacggcagcaagggcgaggagttcgaggacctggacgacacccagaagctggaggtgtacaacagcatcatcgtcgagtcggggcgggcggggctaccggtgcggatgttctcgtcgggccgctctgccggtggccctaagattgcagccacgacgtgggcgcaggcggtgagcgtcttcatcatggcggcgggcaacctggcgtgggacgtgttcaccacggagcacgaggtggaggccatcctcaagggcagcctcaacctcctggcggggctagggggcttcgccgtggaggccgtcgtcggcgcggctgtcaccaaggcggtcgcaaacgtcggcgccggcgtctttgcttgctctctcgcgggcttcgtcgtgggcgccatagccgggctgatcttcatcggcgtcagcggcctcctcattaacctcatcatcggctccccgaggaaggtgcctgacatgagcaagctcatgttccacaccgccgtcatgcccgatggaatggcccttgcgtatgcggtatctcattaa

SEQ ID NO: 26 - protein, 361 aa, Artificial Sequence
  Synthetic construct, ZmPhy1 coding seq
AGMTDLLMLTDKSQLQALAMLLRNNEELMMSQAIKSETERVEYLKTVSDCYTRTMKLLDDSMAARITYERSGGTRSLVARDMDDYVVYGLNACLQNVRNCCVRLDAIDKLRAHYDALADAVAEPAANVEGLAAEASEYKAAMWQYCYNQRSASARAHSRAYSQALKLEGIDFAELVRRHQLRLGYGSKGEEFEDLDDTQKLEVYNSIIVESGRAGLPVRMFSSGRSAGGPKIAATTWAQAVSVFIMAAGNLAWDVFTTEHEVEAILKGSLNLLAGLGGFAVEAVVGAAVTKAVANVGAGVFACSLAGFVVGAIAGLIFIGVSGLLINLIIGSPRKVPDMSKLMFHTAVMPDGMALAYAVSH

SEQ ID NO: 27 - DNA, 1089 bp, Artificial Sequence
  Synthetic construct, ZmPhy2 coding seq
gccgggatgactgatctgctgatgctgaccgacaagtcgcagctgcaggcgctggcgatgctgctgcggaacaacgaggagctcatgatgagccaggcgatcaagtcggagacggagcgcattgagtacctcaagacggtgagcgactgctacacgcggacgatgaagctcctcgacgattccatggcggccaggaccacgtacgagcgttcgggcggaacgaggagcctcgtcgcgcgggacatggacgactacgtcgtctacggcctcaacgcgtgcttgcagaacgtccgcaactgctgcgtgcgcctggacgccatcgacaagctgcgggcgcactacgacgccctcgccgacgccgtcgccgacccggccgccaacgtcgagggcctcgccgcggaggcgtccgagtacaaggccgccatgtggcagtactgctacaaccagcggagcgcctccgcgcgggcgcactcccgcgcctactcccaggcgctcaagctggagggcatcgacttcgccgagctggtgcggaggcaccagctccggctcgggtacggcagcaagggcgaggagttcgaggacctggacgacacccagaagctggaggtgtacaaacagcatcatcgtcgagtcggggcggggcgggggctaccggtgcggatgttctcgtcgggccgctctgccggtggccctaagattgcagccacgacgtgggcggaggcggtgagcgtcttcatcatggcggcgggcaacctggcgtgggacgtgttcaccacggagcacgaggtggaggccatcctcaagggcagcctcaacctcctggcggggctagggggcttcgccgtggaggccgtcgtcggcgcggctgtcaccaaggcggtcgcaaacgtcggcgccggcgtctttgcttgctctctcgccggcttcgtcgtgggcgccatcgccgggctgatcttcgtcggcgtcagcggcctcctcattaacctcatcatcggctccccaaggaaggtgcctgacatgagcaagctcatgttccacaccgccgtcatgcccgatggaatggcccttgcgtatgcggtatctcattaa

SEQ ID NO: 28 - protein, 362 aa, Artificial Sequence
  Synthetic construct, ZmPhy2 polypeptide
AGMTDLLMLTDKSQLQALAMLLRNNEELMMSQAIKSETERIEYLKTVSDCYTRTMKLLDDSMAARTTYERSGGTRSLVARDMDDYVVYGLNACLQNVRNCCVRLDAIDKLRAHYDALADAVADPAANVEGLAAEASEYKAAMWQYCYNQRSASARAHSRAYSQALKLEGIDFAELVRRHQLRLGYGSKGEEFEDLDDTQKLEVYKQHHRRVGAGRGLPVRMFSSGRSAGGPKIAATTWAEAVSVFIMAAGNLAWDVFTTEHEVEAILKGSLNLLAGLGGFAVEAVVGAAVTKAVANVGAGVFACSLAGFVVGAIAGLIFVGVSGLLINLIIGSPRKVPDMSKLMFHTAVMPDGMALAYAVSH

SEQ ID NO: 29 - DNA, 24 bp, Hordeum vulgare
  misc_feature (1)..(25): HvVSD coding seq
gacgagctgaaggccgaggccaag

SEQ ID NO: 30 - protein, 8 aa, Hordeum vulgare
  MISC_FEATURE (1)..(8): HvVSD polypetide
DELKAEAK

SEQ ID NO: 31 - DNA, 18 bp, Artificial Sequence
  Synthetic construct, SEKDEL coding seq
agcgagaaggacgagctg

SEQ ID NO: 32 - protein, 6 aa, Artificial Sequence
  Synthetic construct, SEKDEL peptide
SEKDEL

SEQ ID NO: 33 - DNA, 276 bp, Agrobacterium tumefaciens
  terminator (1)..(276): NOS terminator
tccccgaatttccccgatcgttcaaacatttggcaataaagtttcttaagattgaatcctgttgccggtcttgcgatgattatcatataatttctgttgaattacgttaagcatgtaataattaacatgtaatgcatgacgttatttatgagatgggtttttatgattagagtcccgcaattatacatttaatacgcgatagaaaacaaaatatagcgcgcaaactaggataaattatcgcgcgcggtgtcatctatgttactagatcgggaattg

SEQ ID NO: 34 - DNA, 180 bp, Cauliflower mosaic virus
  terminator (1)..(180): CaMV 35S terminator
ctgcacaaagtggagtagtcagtcatcgatcaggaaccagacaccagacttttattcatacagtgaagtgaagtgaagtgcagtgcagtgagttgctggtttttgtacaacttagtatgtatttgtatttgtaaaatacttctatcaataaaatttctaattcctaaaaccaaaatccag

SEQ ID NO: 35 - DNA, 1006 bp, Zea mays
  terminator (1)..(1006): Maize globulin 1
ggccgccgcgctcgccaaaacgagcaagaagcaacaagagggtggcgcgcgaccgacgtgcgtacgtagcatgagcctgagtggagacgttggacgtgtatgtatatacctctctgcgtgttaactatgtacgtaagcggcaggcagtgcaataagtgtggctctgtagtatgtacgtgcggatacgatgctgtatgctactgaggcaagtcccataaataaataatgacacgtgcgtgttctataatctcttcgcttcttcagtgtccccttgcggagtttggcatccattgatgccgttacactgagaacataacggacacagtagacgaaccacttgagttcttgtatgaaattctgacccttttttttgaaggatcaggagggggaaacccctactggcctggtccttttacaatcaataaaaagaaaagaaaaagaaagaaaaaggaagagctatttctatatttgccacaaatttagccagttcgggattgaggtgtcgaattctccccgtgctctgtgaatgattagtcgcaattctctactaaattcctgagtacagcggagcacggagggatctctgtttgaaaacaaccactcgtttcggcttttccagatgctccaagtcataagaatagtgatctccatagagaagggaacgttgagctggtgtttgaggttcacagatgcctcttcagggttggaaattctgggtggggtaatgccaattgagttccagcaggctttcgcgaagttgcatctgaggaaaagatgataaagggtctcctctctttgccaaaggcagttttcgcaagagtaggaatctagctccatgtttctccttctcaacatatttctggtgtttagcctgttcttaagccacagccaatagaagactctatgcttaggctgacacttacttttccaaactagtttgtagataggatgagtttgcatctggcccatgaaagatctgtaagctttttgggacgacccggggaat

SEQ ID NO: 36 - DNA, 3676 bp, Artificial Sequence
  Synthetic construct, prGTL:ZmGammaZein27:Phy-02:SEKDEL:NOS
tccatgctgtcctactacttgcttcatccccttctacattttgttctggtttttggcctgcatttcggatcatgatgtatgtgatttccaatctgctgcaatatgaatggagactctgtgctaaccatcaacaacatgaaatgcttatgaggcctttgctgagcagccaatcttgcctgtgtttatgtcttcacaggccgaattcctctgttttgtttttcaccctcaatatttggaaacatttatctaggttgtttgtgtccaggcctataaatcatacatgatgttgtcgtattggatgtgaatgtggtggcgtgttcagtgccttggatttgagtttgatgagagttgcttctgggtcaccactcaccattatcgatgctcctcttcagcataaggtaaaagtcttccctgtttacgttattttacccactatggttgcttgggttggttttttcctgattgcttatgccatggaaagtcatttgatatgttgaacttgaattaactgtagaattgtatacatgttccatttgtgttgtacttccttcttttctattagtagcctcagatgagtgtgaaaaaaacagattatataacttgccctataaatcatttgaaaaaaatattgtacagtgagaaattgatatatagtgaatttttaagagcatgttttcctaaagaagtatatattttctatgtacaaaggccattgaagtaattgtagatacaggataatgtagactttttggacttacactgctacctttaagtaacaatcatgagcaatagtgttgcaatgatatttaggctgcattcgtttactctcttgatttccatgagcacgcttcccaaactgttaaactctgtgttttttgccaaaaaaaaatgcataggaaagttgcttttaaaaaatcatatcaatccattttttaagttatagctaatacttaattaatcatgcgctaataagtcactctgtttttcgtactagagagattgttttgaaccagcactcaagaacacagccttaacccagccaaataatgctacaacctaccagtccacacctcttgtaaagcatttgttgcatggaaaagctaagatgacagcaacctgttcaggaaaacaactgacaaggtcatagggagagggagcttttggaaaggtgccgtgcagttcaaacaattagttagcagtagggtgttggtttttgctcacagcaataagaagttaatcatggtgtaggcaacccaaataaaacaccaaaatatgcacaaggcagtttgttgtattctgtagtacagacaaaactaaaagtaatgaaagaagatgtggtgttagaaaaggaaacaatatcatgagtaatgtgtgggcattatgggaccacgaaataaaaagaacattttgatgagtcgtgtatcctcgatgagcctcaaaagttctctcaccccggataagaaacccttaagcaatgtgcaaagtttgcattctccactgacataatgcaaaataagatatcatcgatgacatagcaactcatgcatcatatcatgcctctctcaacctattcattcctactcatctacataagtatcttcagctaaatgttagaacataaacccataagtcacgtttgatgagtattaggcgtgacacatgacaaatcacagactcaagcaagataaagcaaaatgatgtgtacataaaactccagagctatatgtcatattgcaaaaagaggagagcttataagacaaggcatgactcacaaaaattcatttgcctttcgtgtcaaaaagaggagggctttacattatccatgtcatattgcaaaagaaagagagaaagaacaacacaatgctgcgtcaattatacatatctgtatgtccatcattattcatccacctttcgtgtaccacacttcatatatcatgagtcacttcatgtctggacattaacaaactctatcttaacatttagatgcaagagcctttatctcactataaatgcacgatgatttctcattgtttctcacaaaaagcattcagttcattagtcctacaacaacggatcctaaaccatgcgcgtgctgctcgtggccctggccctgctggctcttgctgccagcgccacctctgcccagagcgagccggagctgaagctggagagcgtggtgatcgtgagcaggcacggcgtgagggccccgaccaagttcacccagctgatgcaggacgtgaccccggacgcgttctacacctggccggtgaagctgggcgagctgaccccgaggggcggcgagctgatcgcctacctgggccactactggaggcagaggctggtggccgacggcctgctgccgaagaagggctgcccgcagagcggccaggtggccatcatcgccgacgtggacgagaggaccaggaagaccggtgaggccttcgccgccggcctggccccggactgcgccatcaccgtgcacacccaggccgacaccagcagcccggacccgctgttcaacccgctgaagaccggcgtgtgccagctggacgtggcccaggtgaccgacgccatcctggagagggccggcggcagcatcgccgacttcaccggccactaccagaccgccttcagggagctggagagggtgctgaacttcccgcagagcaacctggccctgaagagggagaagcaggacgagagcgccagcctgacccaggccctgccgagcgagctgaaggtgagcgccgacaacgtgagcctgaccggcgcctggagcctggccagcatgctgaccgagattttcctgctgcagcaggcccagggcatgccggagccgggctggggcaggatcaccgacagccaccagtggaacaccctgctgagcctgcacaacgcccagttcgacctgctgcagaggaccccggaggtggccaggagcagggccaccccgctgctggacctgatcaagaccgccctgaccccgcacccgccgcagaagcaggcctacggcgtgaccctgccgaccagcgtgctgttcatcgccggccacgacaccaacctggccaacctgggcggcgccctcgagctgcagtggaccctgccgggccagccggacaacaccccgccgggcggcgagctggtgttcgagaggtggaggaggctgagcgacaacagccagtggattcaggtgagcctggtgttccagaccctgcagcagatgagggacaagaccccgctgttcctgaacaccccgccgggcgaggtgaagctgaccctggccggctgcgaggagaggaacgcccagggcatgtgcagcctggccggcttcacccagatcgtgaacgaggccaggattccggcctgcagcctgagcgagaaggacgagctgtgacctaggtccccgaatttccccgatcgttcaaacatttggcaataaagtttcttaagattgaatcctgttgccggtcttgcgatgattatcatataatttctgttgaattacgttaagcatgtaataattaacatgtaatgcatgacgttatttatgagatgggtttttatgattagagtcccgcaattatacatttaatacgcgatagaaaacaaaatatagcgcgcaaactaggataaattatcgcgcgcggtgtcatctatgttactagatcgggaattg

SEQ ID NO: 37 - DNA, 15787 bp, Artificial Sequence
  Synthetic construct, pAG4281 vector
caaagtaatcatattattttatgtgtgaatcttctttactttttcatttgattatgattatgaaggtatgaccttcataaccttcgtccgaaatccattatatccaaaggaaaataatgcttcgaaggacgaaggattttgatatttaacattttatgttgccttgttcttaattcatagcatttgagaacaagtccccaacaccaatctttatctttactatattaaagcaccagttcaacgatcgtctcgtgtcaatattattaaaaaactcctacatttctttataatcaacccgcactcttataatctcttctcttactactataataagagagtttatgtacaaaataaggtgaaattatgtataagtgttctggaccttggttgttggctcatattcacacaacctaatcaatagaaaacatatgttttattaaaacaaaatttatcatatatatatatatatatatatatatatatatatatatatataatataaaccgtagcaatgcacaggcatatgactagtggcaacttaataccatgtgtgtattaagatgaataagaggtatccaaataaataacttgttcgcttacgtctggatcgaaaggggttggaaacgattaaatctcttcctagtcaaaattaaatagaaggagatttaatcgatttctcccaatccccttcgatccaggtgcaaccgaataagtccttaaatgttgaggaacacgaaacaaccatgcattggcatgtaaagctccaagaattcgttgtatccttaacaactcacagaacatcaaccaaaattgcacgtcaagggtattgggtaagaaacaatcaaacaaatcctctctgtgtgcaaagaaacacggtgagtcatgccgagatcatactcatctgatatacatgcttacagctcacaagacattacaaacaactcatattgcattacaaagatcgtttcatgaaaaataaaataggccggaacaggacaaaaatccttgacgtgtaaagtaaatttacaacaaaaaaaaagccatatgtcaagctaaatctaattcgttttacgtagatcaacaacctgtagaaggcaacaaaactgagccacgcagaagtacagaatgattccagatgaaccatcgacgtgctacgtaaagagagtgacgagtcatatacatttggcaagaaaccatgaagctgcctacagccgtctcggtggcataagaacacaagaaattgtgttaattaatcaaagctataaataacgctcgcatgcctgtgcacttctccatcaccaccactgggtcttcagaccattagctttatctactccagagcgcagaagaacccgatcgacaccggatcctaaaccatgcgcgtgctgctcgtggccctggccctgctggctcttgctgccagcgccacctctgcccagagcgagccggagctgaagctggagagcgtggtgatcgtgagcaggcacggcgtgagggccccgaccaagttcacccagctgatgcaggacgtgaccccggacgcgttctacacctggccggtgaagctgggcgagctgaccccgaggggcggcgagctgatcgcctacctgggccactactggaggcagaggctggtggccgacggcctgctgccgaagaagggctgcccgcagagcggccaggtggccatcatcgccgacgtggacgagaggaccaggaagaccggtgaggccttcgccgccggcctggccccggactgcgccatcaccgtgcacacccaggccgacaccagcagcccggacccgctgttcaacccgctgaagaccggcgtgtgccagctggacgtggcccaggtgaccgacgccatcctggagagggccggcggcagcatcgccgacttcaccggccactaccagaccgccttcagggagctggagagggtgctgaacttcccgcagagcaacctggccctgaagagggagaagcaggacgagagcgccagcctgacccaggccctgccgagcgagctgaaggtgagcgccgacaacgtgagcctgaccggcgcctggagcctggccagcatgctgaccgagattttcctgctgcagcaggcccagggcatgccggagccgggctggggcaggatcaccgacagccaccagtggaacaccctgctgagcctgcacaacgcccagttcgacctgctgcagaggaccccggaggtggccaggagcagggccaccccgctgctggacctgatcaagaccgccctgaccccgcacccgccgcagaagcaggcctacggcgtgaccctgccgaccagcgtgctgttcatcgccggccacgacaccaacctggccaacctgggcggcgccctcgagctgcagtggaccctgccgggccagccggacaacaccccgccgggcggcgagctggtgttcgagaggtggaggaggctgagcgacaacagccagtggattcaggtgagcctggtgttccagaccctgcagcagatgagggacaagaccccgctgttcctgaacaccccgccgggcgaggtgaagctgaccctggccggctgcgaggagaggaacgcccagggcatgtgcagcctggccggcttcacccagatcgtgaacgaggccaggattccggcctgcagcctgagcgagaaggacgagctgtgacctaggtccccgaatttccccgatcgttcaaacatttggcaataaagtttcttaagattgaatcctgttgccggtcttgcgatgattatcatataatttctgttgaattacgttaagcatgtaataattaacatgtaatgcatgacgttatttatgagatgggtttttatgattagagtcccgcaattatacatttaatacgcgatagaaaacaaaatatagcgcgcaaactaggataaattatcgcgcgcggtgtcatctatgttactagatcgggaattggaattcctgcagtgcagcgtgacccggtcgtgcccctctctagagataatgagcattgcatgtctaagttataaaaaattaccacatattttttttgtcacacttgtttgaagtgcagtttatctatctttatacatatatttaaactttactctacgaataatataatctatagtactacaataatatcagtgttttagagaatcatataaatgaacagttagacatggtctaaaggacaattgagtattttgacaacaggactctacagttttatctttttagtgtgcatgtgttctcctttttttttgcaaatagcttcacctatataatacttcatccattttattagtacatccatttagggtttagggttaatggtttttatagactaatttttttagtacatctattttattctattttagcctctaaattaagaaaactaaaactctattttagtttttttatttaataatttagatataaaatagaataaaataaagtgactaaaaattaaacaaataccctttaagaaattaaaaaaactaaggaaacatttttcttgtttcgagtagataatgccagcctgttaaacgccgtcgacgagtctaacggacaccaaccagcgaaccagcagcgtcgcgtcgggccaagcgaagcagacggcacggcatctctgtcgctgcctctggacccctctcgagagttccgctccaccgttggacttgctccgctgtcggcatccagaaattgcgtggcggagcggcagacgtgagccggcacggcaggcggcctcctcctcctctcacggcacggcagctacgggggattcctttcccaccgctccttcgctttcccttcctcgcccgccgtaataaatagacaccccctccacaccctctttccccaacctcgtgttgttcggagcgcacacacacacaaccagatctcccccaaatccacccgtcggcacctccgcttcaaggtacgccgctcgtcctccccccccccccctctctaccttctctagatcggcgttccggtccatggttagggcccggtagttctacttctgttcatgtttgtgttagatccgtgtttgtgttagatccgtgctgctagcgttcgtacacggatgcgacctgtacgtcagacacgttctgattgctaacttgccagtgtttctctttggggaatcctgggatggctctagccgttccgcagacgggatcgatttcatgattttttttgtttcgttgcatagggtttggtttgcccttttcctttatttcaatatatgccgtgcacttgtttgtcgggtcatcttttcatgcttttttttgtcttggttgtgatgatgtggtctggttgggcggtcgttctagatcggagtagaattctgtttcaaactacctggtggatttattaattttggatctgtatgtgtgtgccatacatattcatagttacgaattgaagatgatggatggaaatatcgatctaggataggtatacatgttgatgcgggttttactgatgcatatacagagatgctttttgttcgcttggttgtgatgatgtggtgtggttgggcggtcgttcattcgttctagatcggagtagaatactgtttcaaactacctggtgtatttattaattttggaactgtatgtgtgtgtcatacatcttcatagttacgagtttaagatggatggaaatatcgatctaggataggtatacatgttgatgtgggttttactgatgcatatacatgatggcatatgcagcatctattcatatgctctaaccttgagtacctatctattataataaacaagtatgttttataattattttgatcttgatatacttggatgatggcatatgcagcagctatatgtggatttttttagccctgccttcatacgctatttatttgcttggtactgtttcttttgtcgatgctcaccctgttgtttggtgttacttctgcagatgcagaaactcattaactcagtgcaaaactatgcctggggcagcaaaacggcgttgactgaactttatggtatggaaaatccgtccagccagccgatggccgagctgtggatgggcgcacatccgaaaagcagttcacgagtgcagaatgccgccggagatatcgtttcactgcgtgatgtgattgagagtgataaatcgactctgctcggagaggccgttgccaaacgctttggcgaactgcctttcctgttcaaagtattatgcgcagcacagccactctccattcaggttcatccaaacaaacacaattctgaaatcggttttgccaaagaaaatgccgcaggtatcccgatggatgccgccgagcgtaactataaagatcctaaccacaagccggagctggtttttgcgctgacgcctttccttgcgatgaacgcgtttcgtgaattttccgagattgtctccctactccagccggtcgcaggtgcacatccggcgattgctcactttttacaacagcctgatgccgaacgtttaagcgaactgttcgccagcctgttgaatatgcagggtgaagaaaaatcccgcgcgctggcgattttaaaatcggccctcgatagccagcagggtgaaccgtggcaaacgattcgtttaatttctgaattttacccggaagacagcggtctgttctccccgctattgctgaatgtggtgaaattgaaccctggcgaagcgatgttcctgttcgctgaaacaccgcacgcttacctgcaaggcgtggcgctggaagtgatggcaaactccgataacgtgctgcgtgcgggtctgacgcctaaatacattgatattccggaactggttgccaatgtgaaattcgaagccaaaccggctaaccagttgttgacccagccggtgaaacaaggtgcagaactggacttcccgattccagtggatgattttgccttctcgctgcatgaccttagtgataaagaaaccaccattagccagcagagtgccgccattttgttctgcgtcgaaggcgatgcaacgttgtggaaaggttctcagcagttacagcttaaaccgggtgaatcagcgtttattgccgccaacgaatcaccggtgactgtcaaaggccacggccgtttagcgcgtgtttacaacaagctgtaagagcttactgaaaaaattaacatctcttgctaagctgggagctctagatccccgaatttccccgatcgttcaaacatttggcaataaagtttcttaagattgaatcctgttgccggtcttgcgatgattatcatataatttctgttgaattacgttaagcatgtaataattaacatgtaatgcatgacgttatttatgagatgggtttttatgattagagtcccgcaattatacatttaatacgcgatagaaaacaaaatatagcgcgcaaactaggataaattatcgcgcgcggtgtcatctatgttactagatcgggaattggcgagctcgaattaattcagtacattaaaaacgtccgcaatgtgttattaagttgtctaagcgtcaatttgtttacaccacaatatatcctgccaccagccagccaacagctccccgaccggcagctcggcacaaaatcaccactcgatacaggcagcccatcagtccgggacggcgtcagcgggagagccgttgtaaggcggcagactttgctcatgttaccgatgctattcggaagaacggcaactaagctgccgggtttgaaacacggatgatctcgcggagggtagcatgttgattgtaacgatgacagagcgttgctgcctgtgatcaaatatcatctccctcgcagagatccgaattatcagccttcttattcatttctcgcttaaccgtgacaggctgtcgatcttgagaactatgccgacataataggaaatcgctggataaagccgctgaggaagctgagtggcgctatttctttagaagtgaacgttgacgatcgtcgaccgtaccccgatgaattaattcggacgtacgttctgaacacagctggatacttacttgggcgattgtcatacatgacatcaacaatgtacccgtttgtgtaaccgtctcttggaggttcgtatgacactagtggttcccctcagcttgcgactagatgttgaggcctaacattttattagagagcaggctagttgcttagatacatgatcttcaggccgttatctgtcagggcaagcgaaaattggccatttatgacgaccaatgccccgcagaagctcccatctttgccgccatagacgccgcgccccccttttggggtgtagaacatccttttgccagatgtggaaaagaagttcgttgtcccattgttggcaatgacgtagtagccggcgaaagtgcgagacccatttgcgctatatataagcctacgatttccgttgcgactattgtcgtaattggatgaactattatcgtagttgctctcagagttgtcgtaatttgatggactattgtcgtaattgcttatggagttgtcgtagttgcttggagaaatgtcgtagttggatggggagtagtcatagggaagacgagcttcatccactaaaacaattggcaggtcagcaagtgcctgccccgatgccatcgcaagtacgaggcttagaaccaccttcaacagatcgcgcatagtcttccccagctctctaacgcttgagttaagccgcgccgcgaagcggcgtcggcttgaacgaattgttagacattatttgccgactaccttggtgatctcgcctttcacgtagtgaacaaattcttccaactgatctgcgcgcgaggccaagcgatcttcttgtccaagataagcctgcctagcttcaagtatgacgggctgatactgggccggcaggcgctccattgcccagtcggcagcgacatccttcggcgcgattttgccggttactgcgctgtaccaaatgcgggacaacgtaagcactacatttcgctcatcgccagcccagtcgggcggcgagttccatagcgttaaggtttcatttagcgcctcaaatagatcctgttcaggaaccggatcaaagagttcctccgccgctggacctaccaaggcaacgctatgttctcttgcttttgtcagcaagatagccagatcaatgtcgatcgtggctggctcgaagatacctgcaagaatgtcattgcgctgccattctccaaattgcagttcgcgcttagctggataacgccacggaatgatgtcgtcgtgcacaacaatggtgacttctacagcgcggagaatctcgctctctccaggggaagccgaagtttccaaaaggtcgttgatcaaagctcgccgcgttgtttcatcaagccttacggtcaccgtaaccagcaaatcaatatcactgtgtggcttcaggccgccatccactgcggagccgtacaaatgtacggccagcaacgtcggttcgagatggcgctcgatgacgccaactacctctgatagttgagtcgatacttcggcgatcaccgcttccctcatgatgtttaactcctgaattaagccgcgccgcgaagcggtgtcggcttgaatgaattgttaggcgtcatcctgtgctcccgagaaccagtaccagtacatcgctgtttcgttcgagacttgaggtctagttttatacgtgaacaggtcaatgccgccgagagtaaagccacattttgcgtacaaattgcaggcaggtacattgttcgtttgtgtctctaatcgtatgccaaggagctgtctgcttagtgcccactttttcgcaaattcgatgagactgtgcgcgactcctttgcctcggtgcgtgtgcgacacaacaatgtgttcgatagaggctagatcgttccatgttgagttgagttcaatcttcccgacaagctcttggtcgatgaatgcgccatagcaagcagagtcttcatcagagtcatcatccgagatgtaatccttccggtaggggctcacacttctggtagatagttcaaagccttggtcggataggtgcacatcgaacacttcacgaacaatgaaatggttctcagcatccaatgtttccgccacctgctcagggatcaccgaaatcttcatatgacgcctaacgcctggcacagcggatcgcaaacctggcgcggcttttggcacaaaaggcgtgacaggtttgcgaatccgttgctgccacttgttaacccttttgccagatttggtaactataatttatgttagaggcgaagtcttgggtaaaaactggcctaaaattgctggggatttcaggaaagtaaacatcaccttccggctcgatgtctattgtagatatatgtagtgtatctacttgatcgggggatctgctgcctcgcgcgtttcggtgatgacggtgaaaacctctgacacatgcagctcccggagacggtcacagcttgtctgtaagcggatgccgggagcagacaagcccgtcagggcgcgtcagcgggtgttggcgggtgtcggggcgcagccatgacccagtcacgtagcgatagcggagtgtatactggcttaactatgcggcatcagagcagattgtactgagagtgcaccatatgcggtgtgaaataccgcacagatgcgtaaggagaaaataccgcatcaggcgctcttccgcttcctcgctcactgactcgctgcgctcggtcgttcggctgcggcgagcggtatcagctcactcaaaggcggtaatacggttatccacagaatcaggggataacgcaggaaagaacatgtgagcaaaaggccagcaaaaggccaggaaccgtaaaaaggccgcgttgctggcgtttttccataggctccgcccccctgacgagcatcacaaaaatcgacgctcaagtcagaggtggcgaaacccgacaggactataaagataccaggcgtttccccctggaagctccctcgtgcgctctcctgttccgaccctgccgcttaccggatacctgtccgcctttctcccttcgggaagcgtggcgctttctcatagctcacgctgtaggtatctcagttcggtgtaggtcgttcgctccaagctgggctgtgtgcacgaaccccccgttcagcccgaccgctgcgccttatccggtaactatcgtcttgagtccaacccggtaagacacgacttatcgccactggcagcagccactggtaacaggattagcagagcgaggtatgtaggcggtgctacagagttcttgaagtggtggcctaactacggctacactagaaggacagtatttggtatctgcgctctgctgaagccagttaccttcggaaaaagagttggtagctcttgatccggcaaacaaaccaccgctggtagcggtggtttttttgtttgcaagcagcagattacgcgcagaaaaaaaggatctcaagaagatcctttgatcttttctacggggtctgacgctcagtggaacgaaaactcacgttaagggattttggtcatgagattatcaaaaaggatcttcacctagatccttttaaattaaaaatgaagttttaaatcaatctaaagtatatatgagtaaacttggtctgacagttaccaatgcttaatcagtgaggcacctatctcagcgatctgtctatttcgttcatccatagttgcctgactccccgtcgtgtagataactacgatacgggagggcttaccatctggccccagtgctgcaatgataccgcgagacccacgctcaccggctccagatttatcagcaataaaccagccagccggaagggccgagcgcagaagtggtcctgcaactttatccgcctccatccagtctattaattgttgccgggaagctagagtaagtagttcgccagttaatagtttgcgcaacgttgttgccattgctgcaggggggggggggggggggttccattgttcattccacggacaaaaacagagaaaggaaacgacagaggccaaaaagctcgctttcagcacctgtcgtttcctttcttttcagagggtattttaaataaaaacattaagttatgacgaagaagaacggaaacgccttaaaccggaaaattttcataaatagcgaaaacccgcgaggtcgccgccccgtaacctgtcggatcaccggaaaggacccgtaaagtgataatgattatcatctacatatcacaacgtgcgtggaggccatcaaaccacgtcaaataatcaattatgacgcaggtatcgtattaattgatctgcatcaacttaacgtaaaaacaacttcagacaatacaaatcagcgacactgaatacggggcaacctcatgtccccccccccccccccctgcaggcatcgtggtgtcacgctcgtcgtttggtatggcttcattcagctccggttcccaacgatcaaggcgagttacatgatcccccatgttgtgcaaaaaagcggttagctccttcggtcctccgatcgttgtcagaagtaagttggccgcagtgttatcactcatggttatggcagcactgcataattctcttactgtcatgccatccgtaagatgcttttctgtgactggtgagtactcaaccaagtcattctgagaatagtgtatgcggcgaccgagttgctcttgcccggcgtcaacacgggataataccgcgccacatagcagaactttaaaagtgctcatcattggaaaacgttcttcggggcgaaaactctcaaggatcttaccgctgttgagatccagttcgatgtaacccactcgtgcacccaactgatcttcagcatcttttactttcaccagcgtttctgggtgagcaaaaacaggaaggcaaaatgccgcaaaaaagggaataagggcgacacggaaatgttgaatactcatactcttcctttttcaatattattgaagcatttatcagggttattgtctcatgagcggatacatatttgaatgtatttagaaaaataaacaaataggggttccgcgcacatttccccgaaaagtgccacctgacgtctaagaaaccattattatcatgacattaacctataaaaataggcgtatcacgaggccctttcgtcttcaagaattggtcgacgatcttgctgcgttcggatattttcgtggagttcccgccacagacccggattgaaggcgagatccagcaactcgcgccagatcatcctgtgacggaactttggcgcgtgatgactggccaggacgtcggccgaaagagcgacaagcagatcacgcttttcgacagcgtcggatttgcgatcgaggatttttcggcgctgcgctacgtccgcgaccgcgttgagggatcaagccacagcagcccactcgaccttctagccgacccagacgagccaagggatctttttggaatgctgctccgtcgtcaggctttccgacgtttgggtggttgaacagaagtcattatcgcacggaatgccaagcactcccgaggggaaccctgtggttggcatgcacatacaaatggacgaacggataaaccttttcacgcccttttaaatatccgattattctaataaacgctcttttctcttaggtttacccgccaatatatcctgtcaaacactgatagtttaaactgaaggcgggaaacgacaacctgatcatgagcggagaattaagggagtcacgttatgacccccgccgatgacgcgggacaagccgttttacgtttggaactgacagaaccgcaacgttgaaggagccactcagcttaattaagtctaactcgagttactggtacgtaccaaatccatggaatcaaggtaccaaagtaatcatattattttatgtgtgaatcttctttactttttcatttgattatgattatgaaggtatgaccttcataaccttcgtccgaaatccattatatccaaaggaaaataatgcttcgaaggacgaaggattttgatatttaacattttatgttgccttgttcttaattcatagcatttgagaacaagtccccaacaccaatctttatctttactatattaaagcaccagttcaacgatcgtctcgtgtcaatattattaaaaaactcctacatttctttataatcaacccgcactcttataatctcttctcttactactataataagagagtttatgtacaaaataaggtgaaattatgtataagtgttctggaccttggttgttggctcatattcacacaacctaatcaatagaaaacatatgttttattaaaacaaaatttatcatatatatatatatatatatatatatatatatatatatatataatataaaccgtagcaatgcacaggcatatgactagtggcaacttaataccatgtgtgtattaagatgaataagaggtatccaaataaataacttgttcgcttacgtctggatcgaaaggggttggaaacgattaaatctcttcctagtcaaaattaaatagaaggagatttaatcgatttctcccaatccccttcgatccaggtgcaaccgaataagtccttaaatgttgaggaacacgaaacaaccatgcattggcatgtaaagctccaagaattcgttgtatccttaacaactcacagaacatcaaccaaaattgcacgtcaagggtattgggtaagaaacaatcaaacaaatcctctctgtgtgcaaagaaacacggtgagtcatgccgagatcatactcatctgatatacatgcttacagctcacaagacattacaaacaactcatattgcattacaaagatcgtttcatgaaaaataaaataggccggaacaggacaaaaatccttgacgtgtaaagtaaatttacaacaaaaaaaaagccatatgtcaagctaaatctaattcgttttacgtagatcaacaacctgtagaaggcaacaaaactgagccacgcagaagtacagaatgattccagatgaaccatcgacgtgctacgtaaagagagtgacgagtcatatacatttggcaagaaaccatgaagctgcctacagccgtctcggtggcataagaacacaagaaattgtgttaattaatcaaagctataaataacgctcgcatgcctgtgcacttctccatcaccaccactgggtcttcagaccattagctttatctactccagagcgcagaagaacccgatcgacaccggatcctaaaccatgcgcgtgctgctcgtggccctggccctgctggctcttgctgccagcgccacctctgcccagagcgagccggagctgaagctggagagcgtggtgatcgtgagcaggcacggcgtgagggccccgaccaagttcacccagctgatgcaggacgtgaccccggacgcgttctacacctggccggtgaagctgggcgagctgaccccgaggggcggcgagctgatcgcctacctgggccactactggaggcagaggctggtggccgacggcctgctgccgaagaagggctgcccgcagagcggccaggtggccatcatcgccgacgtggacgagaggaccaggaagaccggtgaggccttcgccgccggcctggccccggactgcgccatcaccgtgcacacccaggccgacaccagcagcccggacccgctgttcaacccgctgaagaccggcgtgtgccagctggacgtggcccaggtgaccgacgccatcctggagagggccggcggcagcatcgccgacttcaccggccactaccagaccgccttcagggagctggagagggtgctgaacttcccgcagagcaacctggccctgaagagggagaagcaggacgagagcgccagcctgacccaggccctgccgagcgagctgaaggtgagcgccgacaacgtgagcctgaccggcgcctggagcctggccagcatgctgaccgagattttcctgctgcagcaggcccagggcatgccggagccgggctggggcaggatcaccgacagccaccagtggaacaccctgctgagcctgcacaacgcccagttcgacctgctgcagaggaccccggaggtggccaggagcagggccaccccgctgctggacctgatcaagaccgccctgaccccgcacccgccgcagaagcaggcctacggcgtgaccctgccgaccagcgtgctgttcatcgccggccacgacaccaacctggccaacctgggcggcgccctcgagctgcagtggaccctgccgggccagccggacaacaccccgccgggcggcgagctggtgttcgagaggtggaggaggctgagcgacaacagccagtggattcaggtgagcctggtgttccagaccctgcagcagatgagggacaagaccccgctgttcctgaacaccccgccgggcgaggtgaagctgaccctggccggctgcgaggagaggaacgcccagggcatgtgcagcctggccggcttcacccagatcgtgaacgaggccaggattccggcctgcagcctgagcgagaaggacgagctgtgacctaggtccccgaatttccccgatcgttcaaacatttggcaataaagtttcttaagattgaatcctgttgccggtcttgcgatgattatcatataatttctgttgaattacgttaagcatgtaataattaacatgtaatgcatgacgttatttatgagatgggtttttatgattagagtcccgcaattatacatttaatacgcgatagaaaacaaaatatagcgcgcaaactaggataaattatcgcgcgcggtgtcatctatgttactagatcgggaattgggtac

SEQ ID NO: 38 - DNA, 11 bp, Artificial Sequence
  Synthetic construct, partial  promoter sequence
gtgtgaggcgc

SEQ ID NO: 39 - DNA, 480 bp, Zea mays
  misc_feature (1)..(480): Chromosome 8 excerpt
agtggacctcgaagtctatctttcgagcagaaatttttgaatgcgtattagtggcagatggatgaatgtctggcctttcccaaacgttaacaagcatatgcattttcaaatattactttcaaatgtttcagcttggcaatcacttgcaaaactctccaacttaaaaagacttgcttttgaatttcttattataaacccagacaacccaagctcatatatcttagagcctttattcttttgtgaccgaactcatcaatattattcatcaccaatcaccattggttatataaatcaagatagatacgtagctaatcgtcttccatgcatattgtccgagatcgcatcgcatctcgcatcaaacgctcagcatccatgttctttcttgacgcaggtgctgttgcagttgctttggcaagtgggggaagcatgactggaacataccctgcttgcttgcttggcaatctgtatagtccgtcatgg

SEQ ID NO: 40 - DNA, 609 bp, Zea mays
  misc_feature (1)..(609): Chromosome 2 excerpt
cgaaggtgctctagggaagagattacaagaggcaattatctagcccaccaagaggtactttatgcaggacattgtttatctatttataggggaacatatagcttcgtgcaaaattacaaatatatctgtaaaaccagtacgtatgatttacaaatgatgtgagggcaatattgttttgtgcctttagcattatggatgacgccttctccctggtacgttgatattctgcctttgtctccttgtgttgttatgacgaagttaacatcttcgtctttctccgtgccttgcttcaaaggtatttcgtcgccgaagctcctgcgacacttaataacactgcgacacttaataacacgttggcaaccaacagctagatgtgttttttaggaccttcaaaagatgaaggcccctaacatcgccttcgccaaatctggaccggcagcaccttggccacacacccttctcggacgaaaccaaacctcttagaaatccagagctcatgggggatgtcaaggtggtggttgacctaaatgaccaccctgattaggccaaatctgggccgctatttccctgacctcacaaccagccgcaaaggcgcggtggacatcctcc

SEQ ID NO: 41 - DNA, 6435 bp, Zea mays
  misc_feature (1)..(6435): Chromosome 5 excerpt (B line)
aagcttcaacgttaatccagccatctttgtcacaatggtttaatgggcaacgaccgttgtgtaatacaactagtttgggagtccaaataccggagagaattagaggtgctaaaatctttttcttattcaaaattcaataaggagaggaatttagcccctccgattttatggcttctaaactagccttaaatgtaaccgtacaagtgagccttcgaatccgttagatataatcaatcatatattaaatttaacacttaaatcctgctacaccggcttacgtagatttgtataaaaaacctaataagccacagttatatccaaactagttttgttggcttccggcggtatgtctcttttctttaccggcggtttataaaaagcggaagccactagtatgagatatgtagatatggactaaaaagatattaatgtaaggagatgtttggtttataagaactaatttttagtccatctattttattttattttagtttctaaattaacaaatacgaaaactaaaattttatttcctatttagcaatttaacgactaaaatgaaataaaataaaaaggactaattactaaatgtgggaactaaaattctattttaatttccatatttactaatttagatattaaaatgaaataaaatggagggaataaaaattagtccctagaaactaaacacccctaaaaattagtctctacaaatcaaacatcccctaaaaattaatcagtagaaaacaaacatctctaaaaattagtagttaaacttatgtaaaaaaaattagtcaaacttatgtaaaaaaccaaataaattaaaaattagaacaaagagagtagttaataaaccacatataacaatagaattgttataaatgctgcttctatttcctccgatcggaactgttcagccaccttccatcgatagcgaacttggatcagccaccttccatcgatagcgaacttggaggttcaaatattgtaaaaatacaagaagaaaggttttactctttatttctttgaaaggggtcgccgaagaaggttagttgatgtctcttatagcttttttgcacaggtgtaagagcaatcaaaccctatatatccgtttcaaatcaatccgaagcgtagagaagtctactgtttttttagcgtggtaaattgtagacccctctcgtggacatggtgacttcttttaacattttaagtatttttaagataatggacacatggataacatatatatactactctttaaattataacggacatgcactaactaaccttcttcggcgacccctttcaaagaaataaagagtatttataaagttgtgataattggatgttgattataaatctaatagtatcaattttatatttaaaatgtgaaaatcgaaaaggaataaattacaatggaccctggctattgtaagtttggaactctgtttccctacaaatcacactcgtgtcaagagcttctagcagcccagaaaaggtggactttgctctagtgtcagaaaagtccgagtgagctatatttcttggaaaatacaagtttgtttcagagcaaaaaacatttttcttttataaaagggccagcatgacaagatgatggctgactatcagcaaaagacacgaagtacaaaaaagaacaaaagatgtaaaaccctgcatccactgtattcatggacaacaaaaacagttcatcgatcattgttcaggtagaacacagtcgaaagaacgcaccccagagccagaatgcgaggaagcctattttcataataaaactgagagcgagaacacatttttttataagcgagcgacaacgttgaaccaagggcaagccatgcgcgtgtactccagcggtcgtcctcaccaacccaagtctcgagtcctgaatcctgatgcgcaccaaccacagccctaccaccgagcttcctgccccctccggccaacacgaaacttccgaaccactgtccactggctcccaagattagcgtatgtctgtgttctctgcaaacaaaaactcgtacattgccttggtcgtcttggaccagtcaccacagtccacaccaccagctcccctccctttccggaccctattgtgtttggaaaaatttcactctaaagctattcttatcacactatttttaatgttatcacgtcaataagattaaaatgcatttaagaacgaaatatgctctctcaatgaagagtttcatgacacaattttataggctaacatgtgattttaaatgttgcatgtaaataaccaatatgaatagataaaatagatggagataaataaattgttctcattggtggtttcatgcgcttttcagtaccttgaaaacgggttgacatagtttcgtagtgatgaaactagtttaatctatttcataataaatgtagtgttgtgtcatcaaaaatattatgtaattaatgtcataaataaattctctcataaaactctcatcgagaatggtctaagaaattcagctctattccacgaactctaccttttaataggtccaccatagagttgaaacaggaaaaattgtttagcttagcatttgactctagctccatgaatgatatagattttagaggaaatatctcttatattcttattttcaaggacccacatataggtgacctaattccattgtttctctatctttcatcgcactcacccagtcatctctctcgataaaacgatgcgaggcatgagatggcggcctccatcctcgcctccacgaggagatgcacatggcgagcccactggttgcccgtgagaagtggtcgtagcaagccgactgccgatgtggaggaggtggcacgctagggatatatgtccgccggtgtggaagaggaggtgcgctggggaagcgtgtcgacttggaggaggatgcacaatggggaaagtcgccccgccgatagcgaggttctaggcggtgacgtggaagaggtggcgagatcctaggcgatgggggcgaaaactgcaaggtcctaggccatggtagcggtgggaggcgaggtgaagcgcaatggacatagcattctttttgtgattcggtatgggagggagtgtgtaaatagtagcaatacgggtaattaccctacaactccaagaggaggtacaaaataatgattcctggggcaccccttggagctccacaaaaaactgaagttgaggctaggtcctcatttttttatggcgccagagttgaaggtggtttcgttgatgcgatatattaaaaaattacattaccgcctaacatatgaaggattgactatacaacgtcctcaactataaacttaatattatagctacatctaaaattatttaaatggctctctagatggtcttgtaggaccgtttggacaccatatccaattacattgactcatgcatttatacttgcacacatgcacatcggttgtctccatcttcctactatttaaaggtctaccgaacaaatatccgtcaagcaacccaggaggcgatgttgtcgagcaacctactcatcgagcaacccaataaggcgaggctgccgagcgatctgcctgccaagtaacccaccaaggcggggttgccgaacaacctgcccgccgagcaacccagccaaccaaccggtcctccgagcaacctagcaaaacgacagtcgactcataggaagagtcggcctggtacaatcaagccacgacaacatgacgagacatcatcgagccagatccagaccgtgaaaacggcactgagggatctttgtcaaacatgacgacggatacgtatccctgctgacacatgtgaccggacgaccccgaccgtagaaacctcagcatcggggtttctacagtgacccatacaccggaagggatgagacaatatgtcgtatcaagcgtgcatctacgtatgatgaaagatgacgctgctcggaggatgacagaagatgaagttgtatgaacacatccctaaagcactcattgagctgactcaacagaaactaccaggcactgccacgtctaaatcagagtagctataggaaggcggacaggacgtgacgccataccaggggtacggcgcacgcctcgactaacgactctacaagggctacgaggcccaaaagcgtgacccaacagacgagaccaccggggctacgaggcctagaagcaggataccaaactctaccctagtagaatactagtcctcattgtaacgtctatccttggactataaaagggcaatacaaccctcatccaaacatgatcccgtatctctacaacttcacacaagcactcagctgtaacacgttccatcattgtattgtctacccttgggctataaaagggcaagacaacccccatccaaacatgatcctgtatactcagctgtaacacgttccaagcaatatcacaatcagcactgcactggactagggctccggtctgaactagtataaccagcccgcctcagatccacacccatagctcaccattcgaagtgagtccgtgctaacactcccgccgaatacaaatcttattgtccactggttccagaaaccacgacacttatcttaaaaacttatgtttcaacttaatacatattgaagatagtaaaggtgcaatgcaaatgatagcaacaaatatagaatgattggtaaaattatttattagaactaaatagaacatgtatggtatgtacatgggtagagttatgaaataaagagaataaatataattaattttgagtagttatgcatattttaaaaaaccatatagatttatgtgacgcaagattccagacagtgttgaaatgcctttatttgacaatgtttatagagtgataaacatggcaaatagaccatgagatggttatatgagcaagatagtgcttcccgcgcatgtgttcgttactctcccatgtgttccggtccttcgacagcaaacacttaaagcatggacttaacaaagtgcagtaatgcggtctcattatagcacaccccccacataaaaaaacaatatccgcagctagaagacaacacacagcctaagcacgttcagccgaggccaagcaatccgcatccgccccagcccccagcagccctcaccaaccatcattgtgtgtagttgttgggagaggggagggccttgacgaatgacgaggaccaaccacagccccgccgctacagagctacccgccccaacggcgaccaggaagtttccacgccgctggccttgtgacatgcgcacattgtcttggtcgtctttggacaagtctcgactctccacaccaccagcccggtcccttctcagaagcattagctatttaaacctcgccactcctgctggttctctccaggaagagcagcactagatctctctcccctacagcttcccagcaagccagttgcatacatttcactgctgttatctttctcagcttgatcagtgctttagttctctctagttgcaatggcttgcgatttcccgtgcatggcgacgccccgcgccgacccgcttaactgggggaaggcggcggaggagctgatgggcagccacctggacgaggtcaagcggatggtggccgagtaccgccaaccctcggtgaagatcgagggcgccagcctcagcatcgcgcaggtggccgctgtggccaccggcgctggcgaggctcgggtcgagctggacgagtccgcccgtagccgggtcaaggcaagcagcgactgggtcatgagcagcatgatgaacggcaccgacagctacggcgtcaccaccggcttcggcgccacgttgcacaggaggaccaaggagggcggcgctctccagagggagctcatcaggttcctcaacgctggcgccttcggcaccggcacggacggccacgtcctcccggccgaggcgacgcgcgcggccatgctcgtccgcatcaacaccctcctccaggggtactccgggatccgcttcgagatcctcgaggcgatcgtcaagctgctcaacgccaacgtcacgccgtgcctgccgctccgcggcacggtcaccgcgtccggcgacctcgtgccgctctcctacattgccggcctcgtcaccgggcgtgagaactctgttgccctcgccccagacggcagcaaggtgaacgccgccgaggcattcaagattgccggaatccagggcggcttcttcgagctgcagcccaaggagggtcttgcgatggtgaacggcacggccgtgggctctggcctcgcctccactgtgctcttcgaggctaacatccttgccatcctcgccgaggtcctgtccgccgtgttctgcgaagtcatgaacggcaagccggagtacaccgaccacctgacccacaagctcaagcaccacccgggacagatcgaggctgctgccatcatggagcacatcttggagggcagctcctacatgaagctt

SEQ ID NO: 42 - DNA, 18621 bp, Artificial Sequence
  Synthetic construct, locus 3293
tgggtcgactgattcactgttttccctttttccatttttataattttaatttaagtttgatttccatgttcaaataaattgtgatccaaatcacttcaaaaaatcataaataattagaagagcactttagtaaagtttgatctcatttcttggtgaggatttttatacaaaaataatgttttccctttctgtatttgaggaaaacatatgtaaactcatgtttaaagggaaaagaaatcaaattcctctctaaaacttgtgacatgtgtttgtgtattcatagtggttttgtgtcatacaaaggtagagtgttacaagcttacatgtatgttctacttatggaccctacctatcatcaggcctactgcttctatctcattgtgatctcatatctaaacaaacacaaactctatacctcatagccatgcaatgcacatggagcgcgcatcagtgttaatcatttctattgaggtgaccttccaagctaggcctcgctgagtgaggacatgtgccttaaggggactagtacaccataatagaatctcagtatggttccttgtacttttactacatgtaagtatattcatactacctagtcatcgctatagtattttttccattccttggtaaagggcatgattgcctgacctggtatggcattaaatgtgatggtagacctacacaatggcaacgagtacatctgtagccctaagagcatgtcaggttgaaggtataaccataactcatataataatgtagtttgaagcattacttatctccccatttgtagttgttcctgtctagattttatgttacgtttgaggactttctcgaggtgattttcataccagttggtgggacatgtatgataagttgtgtctatgggtgcccaggcctgtgtcgcttggtatgatgtaattggtacctaatgtagccttttgtacttgattgtgttttatggtacactttgtgtgtgcacgctcaactatagggttagtgcacacaccatattgtggtcatgagtaccctatagcctagtcgtggcaacaacatgtgtgtcagggcttgcaatatcgcccatcacacatttcatgctttgtacctaagacttatctactagactatcgctaagaaatagtctataaacccttagatgtgggatcgatttcctagggatataacatccatggtggcccctaatcacatccctctatctttgcaaaaaagattacacttcgagcccatgccccaaagtgcccacatctcgattgcccacaaagtacgagatcagagactcttcagggaacctagcatcaacggatcctaagcagctaagtggtgtagtgtatagggtttagactgtcctaagcatccacagtcttcttatcatcatagaacatgaggggctccgagaacccatatttactagcgtttagggacaatgaggggctccaaggacttaggcttataagtgtctcaggacaggtgaggcctgaggacttataagagaccccctgatgagtgatgccatgcgggtatagtctcatggatgttctaggacatgggggttgtggacttattctttggtcaatgcattgtggcacaaggtgccttagagacttagaccattttacctttgaaggtcttggggagctatggatcccgagcctcatggcgtgttggtgactcaaaaagccaccaaccttctggcatttgagaattcatctcatccaaaaacttctataatatatcattcagtgtcaggcctctcccttggctagggctaggagaggttctagtaacttggggaagcactgatagtttaaactgaaggcgggaaacgacaacctgatcatgagcggagaattaagggagtcacgttatgacccccgccgatgacgcgggacaagccgttttacgtttggaactgacagaaccgcaacgttgaaggagccactcagcctaagcggccgcattggacttaattaagtgaggccggccaagcgtcgatttaaatgtaccacatggcgcgccaactatcatgcgatcgcttcatgtctaactcgagttactggtacgtaccaaatccatggaatcaaggtacctccatgctgtcctactacttgcttcatccccttctacattttgttctggtttttggcctgcatttcggatcatgatgtatgtgatttccaatctgctgcaatatgaatggagactctgtgctaaccatcaacaacatgaaatgcttatgaggcctttgctgagcagccaatcttgcctgtgtttatgtcttcacaggccgaattcctctgttttgtttttcaccctcaatatttggaaacatttatctaggttgtttgtgtccaggcctataaatcatacatgatgttgtcgtattggatgtgaatgtggtggcgtgttcagtgccttggatttgagtttgatgagagttgcttctgggtcaccactcaccattatcgatgctcctcttcagcataaggtaaaagtcttccctgtttacgttattttacccactatggttgcttgggttggttttttcctgattgcttatgccatggaaagtcatttgatatgttgaacttgaattaactgtagaattgtatacatgttccatttgtgttgtacttccttcttttctattagtagcctcagatgagtgtgaaaaaaacagattatataacttgccctataaatcatttgaaaaaaatattgtacagtgagaaattgatatatagtgaatttttaagagcatgttttcctaaagaagtatatattttctatgtacaaaggccattgaagtaattgtagatacaggataatgtagactttttggacttacactgctacctttaagtaacaatcatgagcaatagtgttgcaatgatatttaggctgcattcgtttactctcttgatttccatgagcacgcttcccaaactgttaaactctgtgttttttgccaaaaaaaaatgcataggaaagttgcttttaaaaaatcatatcaatccattttttaagttatagctaatacttaattaatcatgcgctaataagtcactctgtttttcgtactagagagattgttttgaaccagcactcaagaacacagccttaacccagccaaataatgctacaacctaccagtccacacctcttgtaaagcatttgttgcatggaaaagctaagatgacagcaacctgttcaggaaaacaactgacaaggtcatagggagagggagcttttggaaaggtgccgtgcagttcaaacaattagttagcagtagggtgttggtttttgctcacagcaataagaagttaatcatggtgtaggcaacccaaataaaacaccaaaatatgcacaaggcagtttgttgtattctgtagtacagacaaaactaaaagtaatgaaagaagatgtggtgttagaaaaggaaacaatatcatgagtaatgtgtgggcattatgggaccacgaaataaaaagaacattttgatgagtcgtgtatcctcgatgagcctcaaaagttctctcaccccggataagaaacccttaagcaatgtgcaaagtttgcattctccactgacataatgcaaaataagatatcatcgatgacatagcaactcatgcatcatatcatgcctctctcaacctattcattcctactcatctacataagtatcttcagctaaatgttagaacataaacccataagtcacgtttgatgagtattaggcgtgacacatgacaaatcacagactcaagcaagataaagcaaaatgatgtgtacataaaactccagagctatatgtcatattgcaaaaagaggagagcttataagacaaggcatgactcacaaaaattcatttgcctttcgtgtcaaaaagaggagggctttacattatccatgtcatattgcaaaagaaagagagaaagaacaacacaatgctgcgtcaattatacatatctgtatgtccatcattattcatccacctttcgtgtaccacacttcatatatcatgagtcacttcatgtctggacattaacaaactctatcttaacatttagatgcaagagcctttatctcactataaatgcacgatgatttctcattgtttctcacaaaaagcattcagttcattagtcctacaacaacggatcctaaaccatgcgcgtgctgctcgtggccctggccctgctggctcttgctgccagcgccacctctgcccagagcgagccggagctgaagctggagagcgtggtgatcgtgagcaggcacggcgtgagggccccgaccaagttcacccagctgatgcaggacgtgaccccggacgcgttctacacctggccggtgaagctgggcgagctgaccccgaggggcggcgagctgatcgcctacctgggccactactggaggcagaggctggtggccgacggcctgctgccgaagaagggctgcccgcagagcggccaggtggccatcatcgccgacgtggacgagaggaccaggaagaccggtgaggccttcgccgccggcctggccccggactgcgccatcaccgtgcacacccaggccgacaccagcagcccggacccgctgttcaacccgctgaagaccggcgtgtgccagctggacgtggcccaggtgaccgacgccatcctggagagggccggcggcagcatcgccgacttcaccggccactaccagaccgccttcagggagctggagagggtgctgaacttcccgcagagcaacctggccctgaagagggagaagcaggacgagagcgccagcctgacccaggccctgccgagcgagctgaaggtgagcgccgacaacgtgagcctgaccggcgcctggagcctggccagcatgctgaccgagattttcctgctgcagcaggcccagggcatgccggagccgggctggggcaggatcaccgacagccaccagtggaacaccctgctgagcctgcacaacgcccagttcgacctgctgcagaggaccccggaggtggccaggagcagggccaccccgctgctggacctgatcaagaccgccctgaccccgcacccgccgcagaagcaggcctacggcgtgaccctgccgaccagcgtgctgttcatcgccggccacgacaccaacctggccaacctgggcggcgccctcgagctgcagtggaccctgccgggccagccggacaacaccccgccgggcggcgagctggtgttcgagaggtggaggaggctgagcgacaacagccagtggattcaggtgagcctggtgttccagaccctgcagcagatgagggacaagaccccgctgttcctgaacaccccgccgggcgaggtgaagctgaccctggccggctgcgaggagaggaacgcccagggcatgtgcagcctggccggcttcacccagatcgtgaacgaggccaggattccggcctgcagcctgagcgagaaggacgagctgtgacctaggtccccgaatttccccgatcgttcaaacatttggcaataaagtttcttaagattgaatcctgttgccggtcttgcgatgattatcatataatttctgttgaattacgttaagcatgtaataattaacatgtaatgcatgacgttatttatgagatgggtttttatgattagagtcccgcaattatacatttaatacgcgatagaaaacaaaatatagcgcgcaaactaggataaattatcgcgcgcggtgtcatctatgttactagatcgggaattgggtaccaaagtaatcatattattttatgtgtgaatcttctttactttttcatttgattatgattatgaaggtatgaccttcataaccttcgtccgaaatccattatatccaaaggaaaataatgcttcgaaggacgaaggattttgatatttaacattttatgttgccttgttcttaattcatagcatttgagaacaagtccccaacaccaatctttatctttactatattaaagcaccagttcaacgatcgtctcgtgtcaatattattaaaaaactcctacatttctttataatcaacccgcactcttataatctcttctcttactactataataagagagtttatgtacaaaataaggtgaaattatgtataagtgttctggaccttggttgttggctcatattcacacaacctaatcaatagaaaacatatgttttattaaaacaaaatttatcatatatatatatatatatatatatatatatatatatatatataatataaaccgtagcaatgcacaggcatatgactagtggcaacttaataccatgtgtgtattaagatgaataagaggtatccaaataaataacttgttcgcttacgtctggatcgaaaggggttggaaacgattaaatctcttcctagtcaaaattaaatagaaggagatttaatcgatttctcccaatccccttcgatccaggtgcaaccgaataagtccttaaatgttgaggaacacgaaacaaccatgcattggcatgtaaagctccaagaattcgttgtatccttaacaactcacagaacatcaaccaaaattgcacgtcaagggtattgggtaagaaacaatcaaacaaatcctctctgtgtgcaaagaaacacggtgagtcatgccgagatcatactcatctgatatacatgcttacagctcacaagacattacaaacaactcatattgcattacaaagatcgtttcatgaaaaataaaataggccggaacaggacaaaaatccttgacgtgtaaagtaaatttacaacaaaaaaaaagccatatgtcaagctaaatctaattcgttttacgtagatcaacaacctgtagaaggcaacaaaactgagccacgcagaagtacagaatgattccagatgaaccatcgacgtgctacgtaaagagagtgacgagtcatatacatttggcaagaaaccatgaagctgcctacagccgtctcggtggcataagaacacaagaaattgtgttaattaatcaaagctataaataacgctcgcatgcctgtgcacttctccatcaccaccactgggtcttcagaccattagctttatctactccagagcgcagaagaacccgatcgacaccggatcctaaaccatgcgcgtgctgctcgtggccctggccctgctggctcttgctgccagcgccacctctgcccagagcgagccggagctgaagctggagagcgtggtgatcgtgagcaggcacggcgtgagggccccgaccaagttcacccagctgatgcaggacgtgaccccggacgcgttctacacctggccggtgaagctgggcgagctgaccccgaggggcggcgagctgatcgcctacctgggccactactggaggcagaggctggtggccgacggcctgctgccgaagaagggctgcccgcagagcggccaggtggccatcatcgccgacgtggacgagaggaccaggaagaccggtgaggccttcgccgccggcctggccccggactgcgccatcaccgtgcacacccaggccgacaccagcagcccggacccgctgttcaacccgctgaagaccggcgtgtgccagctggacgtggcccaggtgaccgacgccatcctggagagggccggcggcagcatcgccgacttcaccggccactaccagaccgccttcagggagctggagagggtgctgaacttcccgcagagcaacctggccctgaagagggagaagcaggacgagagcgccagcctgacccaggccctgccgagcgagctgaaggtgagcgccgacaacgtgagcctgaccggcgcctggagcctggccagcatgctgaccgagattttcctgctgcagcaggcccagggcatgccggagccgggctggggcaggatcaccgacagccaccagtggaacaccctgctgagcctgcacaacgcccagttcgacctgctgcagaggaccccggaggtggccaggagcagggccaccccgctgctggacctgatcaagaccgccctgaccccgcacccgccgcagaagcaggcctacggcgtgaccctgccgaccagcgtgctgttcatcgccggccacgacaccaacctggccaacctgggcggcgccctcgagctgcagtggaccctgccgggccagccggacaacaccccgccgggcggcgagctggtgttcgagaggtggaggaggctgagcgacaacagccagtggattcaggtgagcctggtgttccagaccctgcagcagatgagggacaagaccccgctgttcctgaacaccccgccgggcgaggtgaagctgaccctggccggctgcgaggagaggaacgcccagggcatgtgcagcctggccggcttcacccagatcgtgaacgaggccaggattccggcctgcagcctgagcgagaaggacgagctgtgacctaggtccccgaatttccccgatcgttcaaacatttggcaataaagtttcttaagattgaatcctgttgccggtcttgcgatgattatcatataatttctgttgaattacgttaagcatgtaataattaacatgtaatgcatgacgttatttatgagatgggtttttatgattagagtcccgcaattatacatttaatacgcgatagaaaacaaaatatagcgcgcaaactaggataaattatcgcgcgcggtgtcatctatgttactagatcgggaattgggtacccggtatgaatttggaaacaaattcagtacttttaaaaaaatttgttgtagggagcaaataatacataaaataatttatgcattattttattttttatttgtaataatatgcttgaaacgataattcagtatgcatgttgtgccagtgtactacacgggcggggggaggggattgagtgggccagcgcggtgcgtagggtagatgggctgaaattgataactcaagtccgactaggttctctttttatttcccttccttttctattttcctttcttttaattttcatgctttcaaactaaattcaaattcgagttttgaatttcagcttctaaattgtacactaaaattatatgataaggtaacccctactattacttttaatttttttattctaccccatattgtttacttaggggagaataattgacttaatcacattcttccttaggtttcaattctcaatctttcaaatccacatttttagatttctattttgaatttaaataccagtttggatttagagttcaatttcaaaatacacaaccaaaataccagcatgaatgcaaatatattttatgtttatgtatttacttttcttttatactttgctcaaaatagttattttcatgtatgaaactcaataagcaaggaactcacgttattatataacctaataggaataatttaggtaacataatttatcatcctcttgatttaaaagagatatgcctccagaataagacacatactaaaaataactctaatattgaataactaaagtcgtacaaatctctactattattcctataaaataataaagaactagctacaacttctttaaggcattattcagggtttacagcttgagaggcatgaacccatcctgtatactcctggacttggaagacaaaatgtcaaccaaagtgaaaggttttcttatggttgctgctaagagatagattgaacactagatctctcctaagacgtcagggcatgcgtttagactcctacacatgcgaaaactgcatcttacagttggaagaaactatatctcaccacttcctgcggtgtaactttgcccaaagatgttggctcactgttggaatcactccgccccgaactttggatctaacgcttgcagtgctacatattagagcaagactaacaatgccgtggagaatggaaggtattataaccatgtcatggtgcatatggaaatgtcgaaataactggatattcgaaaacataccgccaacggtggcggcctgcaaggaaatgttcaagactgaaatgaactacatctgctaccaagttaagctcgagacaggagctaaaagtagaaactggatacaacactttgtaacatagtgacactccccttttcctttcttttaccttagaactatacatacaatccacattcaataaaaatttgtaggtacgccatacacactaccggaatccggctctttgccgagtgtgaggcgctttgtcgagtgctttttgtccagcactcggcaaaaaagtctttgccatgtgccgcactcggcaaagtcctgctctcggtaacgaccgcgtttaccgagagcaggactctcgacacagaaatacactcgacaaagaaatctttgccgagagccaaacactcggcgaacggcagcgctcggcaaagggtcgtcagccgccgtctaaagctgacggtcgttatctttgtcgagtgccccctcgtccgacactcagtagagcaagcttgccgagtgccatccttggacactcgataaagtatattttatttttttttattttgccaaccaaactttttgtggtatgttcctacactatgtagatctacatgtaccattttggcacaattacaaaaatgttttctataactattagatttagttcgtttatttgaatttcttcggaaaattcacatatgaactgcaagtcactcgaaacatgaaaaaccgtgcatgcaaaataaatgatatgcatgttatctagcacaagttacgaccgaattcagaagcagaccagaatcttcaagcaccatgctcactaaacatgaccgtgaacttgttatccagttgtttaaaaattgtataaaacacaaataaagtcagaaattaatgaaacttgtccacatgtcatgatatcatatatagaggttgtgataaaaatttgataatgtttcggtaaagttgtgacgtactatgtgtagaaacctaagtgacctacacataaaatcatagagtttcaatgtagttcactcgacaaagactttgtcaagtgtccgataaaaagtattcagcaaagaagccgttgtcgatttactgttcgtcgagatctctttgccgagtgtcacactaggcaaagtctttacggagtgtttttcaggctttgacactcggcaaagcgctcgattccagtagtgacagtaatttgcatcaaaaatagccgagagatttaaaatgagtcaactaatagaccaactaattattagctattagtcgttagcttctttaatctaagctaaaaccaactaatagcttatttgttgaattacaattagctcaacggaattctctgttttttctataaaaaaaagggaaactgcccctcatttacagcaaactgtccgctgcctgtcgtccagatacaatgaacgtacctagtaggaactcttttacacgctcggtcgctcgccgcggatcggagtcccaggaacacgacaccactgtggaacacgacaaagtctgctcagaggcggccacaccctggcgtgcaccgagccggagcccggataagcacggtaaggagagtacggcgggacgtggcgacccgtgtgtctgctgccacgcagccttcctccacgtagccgcgcggccgcgccacgtaccagggcccggcgctggtataaatgcgcgccacctccgctttagttctgcatacagccaacccaacacacacccgagcatatcacagtgacagacactacacgggatcctaaaccatgcgcgtgctgctcgtggccctggccctgctggctcttgctgccagcgccacctctgcccagagcgagccggagctgaagctggagagcgtggtgatcgtgagcaggcacggcgtgagggccccgaccaagttcacccagctgatgcaggacgtgaccccggacgcgttctacacctggccggtgaagctgggcgagctgaccccgaggggcggcgagctgatcgcctacctgggccactactggaggcagaggctggtggccgacggcctgctgccgaagaagggctgcccgcagagcggccaggtggccatcatcgccgacgtggacgagaggaccaggaagaccggtgaggccttcgccgccggcctggccccggactgcgccatcaccgtgcacacccaggccgacaccagcagcccggacccgctgttcaacccgctgaagaccggcgtgtgccagctggacgtggcccaggtgaccgacgccatcctggagagggccggcggcagcatcgccgacttcaccggccactaccagaccgccttcagggagctggagagggtgctgaacttcccgcagagcaacctggccctgaagagggagaagcaggacgagagcgccagcctgacccaggccctgccgagcgagctgaaggtgagcgccgacaacgtgagcctgaccggcgcctggagcctggccagcatgctgaccgagattttcctgctgcagcaggcccagggcatgccggagccgggctggggcaggatcaccgacagccaccagtggaacaccctgctgagcctgcacaacgcccagttcgacctgctgcagaggaccccggaggtggccaggagcagggccaccccgctgctggacctgatcaagaccgccctgaccccgcacccgccgcagaagcaggcctacggcgtgaccctgccgaccagcgtgctgttcatcgccggccacgacaccaacctggccaacctgggcggcgccctcgagctgcagtggaccctgccgggccagccggacaacaccccgccgggcggcgagctggtgttcgagaggtggaggaggctgagcgacaacagccagtggattcaggtgagcctggtgttccagaccctgcagcagatgagggacaagaccccgctgttcctgaacaccccgccgggcgaggtgaagctgaccctggccggctgcgaggagaggaacgcccagggcatgtgcagcctggccggcttcacccagatcgtgaacgaggccaggattccggcctgcagcctgagcgagaaggacgagctgtgacctaggtccccgaatttccccgatcgttcaaacatttggcaataaagtttcttaagattgaatcctgttgccggtcttgcgatgattatcatataatttctgttgaattacgttaagcatgtaataattaacatgtaatgcatgacgttatttatgagatgggtttttatgattagagtcccgcaattatacatttaatacgcgatagaaaacaaaatatagcgcgcaaactaggataaattatcgcgcgcggtgtcatctatgttactagatcgggaattggaattcctgcagtgcagcgtgacccggtcgtgcccctctctagagataatgagcattgcatgtctaagttataaaaaattaccacatattttttttgtcacacttgtttgaagtgcagtttatctatctttatacatatatttaaactttactctacgaataatataatctatagtactacaataatatcagtgttttagagaatcatataaatgaacagttagacatggtctaaaggacaattgagtattttgacaacaggactctacagttttatctttttagtgtgcatgtgttctcctttttttttgcaaatagcttcacctatataatacttcatccattttattagtacatccatttagggtttagggttaatggtttttatagactaatttttttagtacatctattttattctattttagcctctaaattaagaaaactaaaactctattttagtttttttatttaataatttagatataaaatagaataaaataaagtgactaaaaattaaacaaataccctttaagaaattaaaaaaactaaggaaacatttttcttgtttcgagtagataatgccagcctgttaaacgccgtcgacgagtctaacggacaccaaccagcgaaccagcagcgtcgcgtcgggccaagcgaagcagacggcacggcatctctgtcgctgcctctggacccctctcgagagttccgctccaccgttggacttgctccgctgtcggcatccagaaattgcgtggcggagcggcagacgtgagccggcacggcaggcggcctcctcctcctctcacggcacggcagctacgggggattcctttcccaccgctccttcgctttcccttcctcgcccgccgtaataaatagacaccccctccacaccctctttccccaacctcgtgttgttcggagcgcacacacacacaaccagatctcccccaaatccacccgtcggcacctccgcttcaaggtacgccgctcgtcctccccccccccccctctctaccttctctagatcggcgttccggtccatggttagggcccggtagttctacttctgttcatgtttgtgttagatccgtgtttgtgttagatccgtgctgctagcgttcgtacacggatgcgacctgtacgtcagacacgttctgattgctaacttgccagtgtttctctttggggaatcctgggatggctctagccgttccgcagacgggatcgatttcatgattttttttgtttcgttgcatagggtttggtttgcccttttcctttatttcaatatatgccgtgcacttgtttgtcgggtcatcttttcatgcttttttttgtcttggttgtgatgatgtggtctggttgggcggtcgttctagatcggagtagaattctgtttcaaactacctggtggatttattaattttggatctgtatgtgtgtgccatacatattcatagttacgaattgaagatgatggatggaaatatcgatctaggataggtatacatgttgatgcgggttttactgatgcatatacagagatgctttttgttcgcttggttgtgatgatgtggtgtggttgggcggtcgttcattcgttctagatcggagtagaatactgtttcaaactacctggtgtatttattaattttggaactgtatgtgtgtgtcatacatcttcatagttacgagtttaagatggatggaaatatcgatctaggataggtatacatgttgatgtgggttttactgatgcatatacatgatggcatatgcagcatctattcatatgctctaaccttgagtacctatctattataataaacaagtatgttttataattattttgatcttgatatacttggatgatggcatatgcagcagctatatgtggatttttttagccctgccttcatacgctatttatttgcttggtactgtttcttttgtcgatgctcaccctgttgtttggtgttacttctgcagatgcagaaactcattaactcagtgcaaaactatgcctggggcagcaaaacggcgttgactgaactttatggtatggaaaatccgtccagccagccgatggccgagctgtggatgggcgcacatccgaaaagcagttcacgagtgcagaatgccgccggagatatcgtttcactgcgtgatgtgattgagagtgataaatcgactctgctcggagaggccgttgccaaacgctttggcgaactgcctttcctgttcaaagtattatgcgcagcacagccactctccattcaggttcatccaaacaaacacaattctgaaatcggttttgccaaagaaaatgccgcaggtatcccgatggatgccgccgagcgtaactataaagatcctaaccacaagccggagctggtttttgcgctgacgcctttccttgcgatgaacgcgtttcgtgaattttccgagattgtctccctactccagccggtcgcaggtgcacatccggcgattgctcactttttacaacagcctgatgccgaacgtttaagcgaactgttcgccagcctgttgaatatgcagggtgaagaaaaatcccgcgcgctggcgattttaaaatcggccctcgatagccagcagggtgaaccgtggcaaacgattcgtttaatttctgaattttacccggaagacagcggtctgttctccccgctattgctgaatgtggtgaaattgaaccctggcgaagcgatgttcctgttcgctgaaacaccgcacgcttacctgcaaggcgtggcgctggaagtgatggcaaactccgataacgtgctgcgtgcgggtctgacgcctaaatacattgatattccggaactggttgccaatgtgaaattcgaagccaaaccggctaaccagttgttgacccagccggtgaaacaaggtgcagaactggacttcccgattccagtggatgattttgccttctcgctgcatgaccttagtgataaagaaaccaccattagccagcagagtgccgccattttgttctgcgtcgaaggcgatgcaacgttgtggaaaggttctcagcagttacagcttaaaccgggtgaatcagcgtttattgccgccaacgaatcaccggtgactgtcaaaggccacggccgtttagcgcgtgtttacaacaagctgtaagagcttactgaaaaaattaacatctcttgctaagctgggagctctagatccccgaatttccccgatcgttcaaacatttggcaataaagtttcttaagattgaatcctgttgccggtcttgcgatgattatcatataatttctgttgaattacgttaagcatgtaataattaacatgtaatgcatgacgttatttatgagatgggtttttatgattagagtcccgcaattatacatttaatacgcgatagaaaacaaaatatagcgcgcaaactaggataaattatcgcgcgcggtgtcatctatgttactagatcgggaattggcgagctcgaattaattcagtacattaaaaacgtccgcaatgtgttattaagttgtctaagcgtcaatttgtttacaccacaatatatcctagtggacctcgaagtctatctttcgagcagaaatttttgaatgcgtattagtggcagatggatgaatgtctggcctttcccaaacgttaacaagcatatgcattttcaaatattactttcaaatgtttcagcttggcaatcacttgcaaaactctccaacttaaaaagacttgcttttgaatttcttattataaacccagacaacccaagctcatatatcttagagcctttattcttttgtgaccgaactcatcaatattattcatcaccaatcaccattggttatataaatcaagatagatacgtagctaatcgtcttccatgcatattgtccgagatcgcatcgcatctcgcatcaaacgctcagcatccatgttctttcttgacgcaggtgctgttgcagttgctttggcaggtggggaagcatgactggaacataccttgcttgcatgcttggcaatctgtatagtcgtcatggatagaaaggcaggcgttctgggcttccaagttgcagtcccggctgcaggtgccgtagctgcagtaggccgcctggcacccctggaggacctgcctttcgcagtcctcccgggcagccgtggtgtcgttgtcgcagtagcctctgcaggttgtggagttggcagcctctgcagtgcagttcgtattgcacagcgacccacactcgctgcataatggccctttgtttggatgccccatggaagatacgaccagaatggcgagaacggcggcggtggcgccggcgccggcggcatcagaagccattgctgcagagatggacacggcaaggcaatacctagatatagagaggagataggatgtcaatgtcaacgagattaattggtgctcagatgattgagcggctgatgctatttataggctccaaactaattaagggaacatctagcctaaattattatatagacggggtatctaatgtataattaagggttttagtgttgtatatacaagttgacttgaagtcgtcgaagaggagaatatcatattcacctttcactgggttccattttgatttacaatccgaggtgaagctaaaagttgactggtcacacttaactcagacaggtccaaatgtgaaacaattgtaggatcaaaaaatgcacattcattaattctcattgcagagaacgtaaccacgcgtgcgtcattttttatttattatgtgctaagaatatatttgagaaagatgcaaagggtttcgtttattagataaaacaacatgtaaattttggtattaagcttttaggttgaaccggctgatgcgagaggaaattaagtggtgaaactgaggagctcacaatgttactgacaatcaagtgtctagctaatggagcattaatttttaacaaagtcagaggcagtagagataactcttacaagtagatcgaagattcacgtggagtaacatgcagtgagtacgacactcagtttacttttgatggacaacttgcttttagtcaactgcgtgcatgtccaatcctgtggcgttttccccatcttggttgatacttgctaactatgtacggcacaaagttgacgagcaagagatggcactcggcatggtcgccgcttccgtgcttgctatcttcgagcgagctcgcgcgttgttctcatgtggagcagatt

SEQ ID NO: 43 - DNA, 13109 bp, Artificial Sequence
  Synthetic construct, locus 3507
aagctgccagaagactgagctgataggcgagagctcctacgggtaggtagaacatgtttctctttgcacatgtgcttttttggggtgtttggtttgcccctgctaaaatttagcccctatcacatcgaatgtttgaacctccgttcgaggtattaaatgtagtcggattataaaactaatttctcagccgaacattaaaaagtgagacgaatctagtacagttggttgggtctatatttcatactcctatttaaaagtcaaacgcttgatgtgacccgggctaaattttagtccacagaaccaaacacccccttggctcggggtggcgcagacagagggtatgcaatagcgggggagcagtggcgaagcatcgcgacgagggtggggttcttgctgtcagacaataagtcaagagtggtgggtgtagcggcacggcggggcgagcaatagtgcgccagagatggtgagcgaggtacatgtggtgggcttctagggtcaactgcaggggaggtggttaggattttgtaggcatggcatggtgagcaaggagggcaaacatcacggataagacaaaaagttcgatgagggtgcttgtgtgggaccggtttgtgggggttcgctgtccacagaattggcggcagctagagatgtccaaacgggccgcccggcccggtccggcccgggcccggtgaagcccggtccgttttgggcccggcccgccaggcacgattaaaaaaccgggccgggccggctaagcacgcgggcttaattccttgtccgagcccggcccgcaatgggcctaaacgggccgggccggcccgtttagcacgaaaaaagcgggccgaaaagcgggctatgcgggccgaaaagcacgttttagtgtaaaaaaagcgggcttaacgggcttagagctaaacgggtcgtgccgggctagcccaccgtgcctaatttcctgtccaagcccggcccgcttattcgtgccgggccggcccgggcccgcatataaccgggccgtgccgggctcggaccgggcccaaaaaacgggcttcgtgccgggctcgcgggcctcgtgcttattggacatctatagcggcagcaggggccgggggacatttggtgggttgtcacgaggttgggccctggcctggggattgacggaagatgggcctaaagtagccatgcatgtgtagctactctcgcctgttgatcacttgttctcaattgctatacacaattgaaaataaggcaacacagtgttaaaaagataattaaccttcgtcctccaacaattatcctttcggaataacttttcgaggatgaaggttaggattttaatcgaatgaatcatacatcagtatataaatgagtatacatgaaatgtaaagaacttaaacatgttaactcatctcagatatctcaatatctcatttatctcctttcatataataaatttacaatcgtaccttcggttctacaaagtgagttagagcgaaggtgctctagggaagagattacaagaggcaattatctagcccaccaagaggtactttatgcaggacattgtttatctatttataggggaacatatagcttcgtgcaaaattacaaatatatctgtaaaaccagtacgtatgatttacaaatgatgtgagggcaatattgttttgtgcctttagcattatggatgacgccttctccctggtacgttgatattctgcctttgtctccttgtgttgttatgacgaagttaacatcttcgtctttctccgtgccttgcttcaaaggtatttcgtcgccgaagctcctgcgacacttaataacactgcgacacttaataacacgttggcaaccaacagctagatgtgttttttaggaccttcaaaagatgaaggcccctaacatcgccttcgccaaatctggaccggcagcaccttggccacacacccttctcggacgaaaccaaacctcttagaaatccagagctcatgggggatgtcaaggtggtggttgacctaaatgaccaccctgattaggccaaatctgggccgctatttccctgacctcacaaccagccgcaaaggcgcggtggacatcctcctcaaacactgatagtttaaactgaaggcgggaaacgacaacctgatcatgagcggagaattaagggagtcacgttatgacccccgccgatgacgcgggacaagccgttttacgtttggaactgacagaaccgcaacgttgaaggagccactcagcctaagcggccgcattggacttaattaagtgaggccggccaagcgtcgatttaaatgtaccacatggcgcgccaactatcatgcgatcgcttcatgtctaactcgagttactggtacgtaccaaatccatggaatcaaggtacctccatgctgtcctactacttgcttcatccccttctacattttgttctggtttttggcctgcatttcggatcatgatgtatgtgatttccaatctgctgcaatatgaatggagactctgtgctaaccatcaacaacatgaaatgcttatgaggcctttgctgagcagccaatcttgcctgtgtttatgtcttcacaggccgaattcctctgttttgtttttcaccctcaatatttggaaacatttatctaggttgtttgtgtccaggcctataaatcatacatgatgttgtcgtattggatgtgaatgtggtggcgtgttcagtgccttggatttgagtttgatgagagttgcttctgggtcaccactcaccattatcgatgctcctcttcagcataaggtaaaagtcttccctgtttacgttattttacccactatggttgcttgggttggttttttcctgattgcttatgccatggaaagtcatttgatatgttgaacttgaattaactgtagaattgtatacatgttccatttgtgttgtacttccttcttttctattagtagcctcagatgagtgtgaaaaaaacagattatataacttgccctataaatcatttgaaaaaaatattgtacagtgagaaattgatatatagtgaatttttaagagcatgttttcctaaagaagtatatattttctatgtacaaaggccattgaagtaattgtagatacaggataatgtagactttttggacttacactgctacctttaagtaacaatcatgagcaatagtgttgcaatgatatttaggctgcattcgtttactctcttgatttccatgagcacgcttcccaaactgttaaactctgtgttttttgccaaaaaaaaatgcataggaaagttgcttttaaaaaatcatatcaatccattttttaagttatagctaatacttaattaatcatgcgctaataagtcactctgtttttcgtactagagagattgttttgaaccagcactcaagaacacagccttaacccagccaaataatgctacaacctaccagtccacacctcttgtaaagcatttgttgcatggaaaagctaagatgacagcaacctgttcaggaaaacaactgacaaggtcatagggagagggagcttttggaaaggtgccgtgcagttcaaacaattagttagcagtagggtgttggtttttgctcacagcaataagaagttaatcatggtgtaggcaacccaaataaaacaccaaaatatgcacaaggcagtttgttgtattctgtagtacagacaaaactaaaagtaatgaaagaagatgtggtgttagaaaaggaaacaatatcatgagtaatgtgtgggcattatgggaccacgaaataaaaagaacattttgatgagtcgtgtatcctcgatgagcctcaaaagttctctcaccccggataagaaacccttaagcaatgtgcaaagtttgcattctccactgacataatgcaaaataagatatcatcgatgacatagcaactcatgcatcatatcatgcctctctcaacctattcattcctactcatctacataagtatcttcagctaaatgttagaacataaacccataagtcacgtttgatgagtattaggcgtgacacatgacaaatcacagactcaagcaagataaagcaaaatgatgtgtacataaaactccagagctatatgtcatattgcaaaaagaggagagcttataagacaaggcatgactcacaaaaattcatttgcctttcgtgtcaaaaagaggagggctttacattatccatgtcatattgcaaaagaaagagagaaagaacaacacaatgctgcgtcaattatacatatctgtatgtccatcattattcatccacctttcgtgtaccacacttcatatatcatgagtcacttcatgtctggacattaacaaactctatcttaacatttagatgcaagagcctttatctcactataaatgcacgatgatttctcattgtttctcacaaaaagcattcagttcattagtcctacaacaacggatcctaaaccatgcgcgtgctgctcgtggccctggccctgctggctcttgctgccagcgccacctctgcccagagcgagccggagctgaagctggagagcgtggtgatcgtgagcaggcacggcgtgagggccccgaccaagttcacccagctgatgcaggacgtgaccccggacgcgttctacacctggccggtgaagctgggcgagctgaccccgaggggcggcgagctgatcgcctacctgggccactactggaggcagaggctggtggccgacggcctgctgccgaagaagggctgcccgcagagcggccaggtggccatcatcgccgacgtggacgagaggaccaggaagaccggtgaggccttcgccgccggcctggccccggactgcgccatcaccgtgcacacccaggccgacaccagcagcccggacccgctgttcaacccgctgaagaccggcgtgtgccagctggacgtggcccaggtgaccgacgccatcctggagagggccggcggcagcatcgccgacttcaccggccactaccagaccgccttcagggagctggagagggtgctgaacttcccgcagagcaacctggccctgaagagggagaagcaggacgagagcgccagcctgacccaggccctgccgagcgagctgaaggtgagcgccgacaacgtgagcctgaccggcgcctggagcctggccagcatgctgaccgagattttcctgctgcagcaggcccagggcatgccggagccgggctggggcaggatcaccgacagccaccagtggaacaccctgctgagcctgcacaacgcccagttcgacctgctgcagaggaccccggaggtggccaggagcagggccaccccgctgctggacctgatcaagaccgccctgaccccgcacccgccgcagaagcaggcctacggcgtgaccctgccgaccagcgtgctgttcatcgccggccacgacaccaacctggccaacctgggcggcgccctcgagctgcagtggaccctgccgggccagccggacaacaccccgccgggcggcgagctggtgttcgagaggtggaggaggctgagcgacaacagccagtggattcaggtgagcctggtgttccagaccctgcagcagatgagggacaagaccccgctgttcctgaacaccccgccgggcgaggtgaagctgaccctggccggctgcgaggagaggaacgcccagggcatgtgcagcctggccggcttcacccagatcgtgaacgaggccaggattccggcctgcagcctgagcgagaaggacgagctgtgacctaggtccccgaatttccccgatcgttcaaacatttggcaataaagtttcttaagattgaatcctgttgccggtcttgcgatgattatcatataatttctgttgaattacgttaagcatgtaataattaacatgtaatgcatgacgttatttatgagatgggtttttatgattagagtcccgcaattatacatttaatacgcgatagaaaacaaaatatagcgcgcaaactaggataaattatcgcgcgcggtgtcatctatgttactagatcgggaattgggtaccaaagtaatcatattattttatgtgtgaatcttctttactttttcatttgattatgattatgaaggtatgaccttcataaccttcgtccgaaatccattatatccaaaggaaaataatgcttcgaaggacgaaggattttgatatttaacattttatgttgccttgttcttaattcatagcatttgagaacaagtccccaacaccaatctttatctttactatattaaagcaccagttcaacgatcgtctcgtgtcaatattattaaaaaactcctacatttctttataatcaacccgcactcttataatctcttctcttactactataataagagagtttatgtacaaaataaggtgaaattatgtataagtgttctggaccttggttgttggctcatattcacacaacctaatcaatagaaaacatatgttttattaaaacaaaatttatcatatatatatatatatatatatatatatatatatatatatataatataaaccgtagcaatgcacaggcatatgactagtggcaacttaataccatgtgtgtattaagatgaataagaggtatccaaataaataacttgttcgcttacgtctggatcgaaaggggttggaaacgattaaatctcttcctagtcaaaattaaatagaaggagatttaatcgatttctcccaatccccttcgatccaggtgcaaccgaataagtccttaaatgttgaggaacacgaaacaaccatgcattggcatgtaaagctccaagaattcgttgtatccttaacaactcacagaacatcaaccaaaattgcacgtcaagggtattgggtaagaaacaatcaaacaaatcctctctgtgtgcaaagaaacacggtgagtcatgccgagatcatactcatctgatatacatgcttacagctcacaagacattacaaacaactcatattgcattacaaagatcgtttcatgaaaaataaaataggccggaacaggacaaaaatccttgacgtgtaaagtaaatttacaacaaaaaaaaagccatatgtcaagctaaatctaattcgttttacgtagatcaacaacctgtagaaggcaacaaaactgagccacgcagaagtacagaatgattccagatgaaccatcgacgtgctacgtaaagagagtgacgagtcatatacatttggcaagaaaccatgaagctgcctacagccgtctcggtggcataagaacacaagaaattgtgttaattaatcaaagctataaataacgctcgcatgcctgtgcacttctccatcaccaccactgggtcttcagaccattagctttatctactccagagcgcagaagaacccgatcgacaccggatcctaaaccatgcgcgtgctgctcgtggccctggccctgctggctcttgctgccagcgccacctctgcccagagcgagccggagctgaagctggagagcgtggtgatcgtgagcaggcacggcgtgagggccccgaccaagttcacccagctgatgcaggacgtgaccccggacgcgttctacacctggccggtgaagctgggcgagctgaccccgaggggcggcgagctgatcgcctacctgggccactactggaggcagaggctggtggccgacggcctgctgccgaagaagggctgcccgcagagcggccaggtggccatcatcgccgacgtggacgagaggaccaggaagaccggtgaggccttcgccgccggcctggccccggactgcgccatcaccgtgcacacccaggccgacaccagcagcccggacccgctgttcaacccgctgaagaccggcgtgtgccagctggacgtggcccaggtgaccgacgccatcctggagagggccggcggcagcatcgccgacttcaccggccactaccagaccgccttcagggagctggagagggtgctgaacttcccgcagagcaacctggccctgaagagggagaagcaggacgagagcgccagcctgacccaggccctgccgagcgagctgaaggtgagcgccgacaacgtgagcctgaccggcgcctggagcctggccagcatgctgaccgagattttcctgctgcagcaggcccagggcatgccggagccgggctggggcaggatcaccgacagccaccagtggaacaccctgctgagcctgcacaacgcccagttcgacctgctgcagaggaccccggaggtggccaggagcagggccaccccgctgctggacctgatcaagaccgccctgaccccgcacccgccgcagaagcaggcctacggcgtgaccctgccgaccagcgtgctgttcatcgccggccacgacaccaacctggccaacctgggcggcgccctcgagctgcagtggaccctgccgggccagccggacaacaccccgccgggcggcgagctggtgttcgagaggtggaggaggctgagcgacaacagccagtggattcaggtgagcctggtgttccagaccctgcagcagatgagggacaagaccccgctgttcctgaacaccccgccgggcgaggtgaagctgaccctggccggctgcgaggagaggaacgcccagggcatgtgcagcctggccggcttcacccagatcgtgaacgaggccaggattccggcctgcagcctgagcgagaaggacgagctgtgacctaggtccccgaatttccccgatcgttcaaacatttggcaataaagtttcttaagattgaatcctgttgccggtcttgcgatgattatcatataatttctgttgaattacgttaagcatgtaataattaacatgtaatgcatgacgttatttatgagatgggtttttatgattagagtcccgcaattatacatttaatacgcgatagaaaacaaaatatagcgcgcaaactaggataaattatcgcgcgcggtgtcatctatgttactagatcgggaattgggtacccggtatgaatttggaaacaaattcagtacttttaaaaaaatttgttgtagggagcaaataatacataaaataatttatgcattattttattttttatttgtaataatatgcttgaaacgataattcagtatgcatgttgtgccagtgtactacacgggcggggggaggggattgagtgggccagcgcggtgcgtagggtagatgggctgaaattgataactcaagtccgactaggttctctttttatttcccttccttttctattttcctttcttttaattttcatgctttcaaactaaattcaaattcgagttttgaatttcagcttctaaattgtacactaaaattatatgataaggtaacccctactattacttttaatttttttattctaccccatattgtttacttaggggagaataattgacttaatcacattcttccttaggtttcaattctcaatctttcaaatccacatttttagatttctattttgaatttaaataccagtttggatttagagttcaatttcaaaatacacaaccaaaataccagcatgaatgcaaatatattttatgtttatgtatttacttttcttttatactttgctcaaaatagttattttcatgtatgaaactcaataagcaaggaactcacgttattatataacctaataggaataatttaggtaacataatttatcatcctcttgatttaaaagagatatgcctccagaataagacacatactaaaaataactctaatattgaataactaaagtcgtacaaatctctactattattcctataaaataataaagaactagctacaacttctttaaggcattattcagggtttacagcttgagaggcatgaacccatcctgtatactcctggacttggaagacaaaatgtcaaccaaagtgaaaggttttcttatggttgctgctaagagatagattgaacactagatctctactaagacgtcagggcatgcgtttagactcctacacatgcgaaaactgcatcttacagttggaagaaactatatctcaccacttcctgcggtgtaactttgcccaaagatgttggctcactgttggaatcactccgccccgaactttggatctaacgcttgcagtgctacatattagagcaagactaacaatgccgtggagaatggaaggtattataaccatgtcatggtgcatatggaaatgtcgaaataactggatattcgaaaacataccgccaacggtggcggcctgcaaggaaatgttcaagactgaaatgaactacatctgctaccaagttaagctcgagacaggagctaaaagtagaaactggatacaacactttgtaacatagtgacactccccttttcctttcttttaccttagaactatacatacaatccacattcaataaaaatttgtaggtacgccatacacactaccggaatccggctctttgccgagtgtgaggcgcgagccactaggcgtgtgaaaaaaacgtttcgaggttttttcaagacgctcgaaagaaaaggacgtaccttcgaaggccaggggaatgaagtgatgaacgtaggaggtgaatcgaaggagtgccacgccatatcagagggcagcaggtccatcgggatctcgggagcaatggtttggaggcaggcgcgtaactggtctatggactctagcataaccacatcaccctcggatgtgtaggcatgcaggagccagcacttgagagcgtggttgctgggaggcaactaagcttctagatactatgtgtgactcccagcattttctttattgcccgagctttcctccgaagctgaggactcctccccaccctgagagtggccggcgtccgacaccgaggaggcgaagcaggatgtagtagcactgacacggttatggcttggaaagataggggcgaccggtgtccactagagggggaggggtagcgacatgaatgcctacctcccactagggaagaagatggacgttaaccgtgcacacatagaaagacgaggcaacaacttcatcggtaggggaggccccatgatcaccacagtgcaagcatccggggtgggtggagatatgcagaggggcgtgcaggggacgagggtggcgtgtgaggccgcgcggcctccccctccgctcgcatgctggctacagacgcgccccttgccgtgcagcgcttccccctggaagcccctctacgcaggggaaaggaacaggagcacgctgcagatagcgtgagcccgtgacgccccctgccactgtttcttcgttgggtgagtttttaatatgtgaaaaaaaaatggtaataaatgatgagtaggtttggatagtgatattttatagttgtagtggggtatagggggagaatatagagggaaccgctgcgggagatgaaaaagtaggggatgaaatgttgatgatgtgacgcaaaaaagtgatatagggggacaaatttaggggtaaccgttgcagatagtctgaggcagcgtcgcagcggttccaagctggaggagaggtcattgatgggaacaaccacaacagagaaggggtggagcggacatggatcaaagggtggcggcggtggaatgaggcgaggacgtggttgatcggcgtggcgtgggatgggctctaatgaccaaagtccctatagtttctacaacaaacggggtcgcaacagtctttgacttggtgatcggaggcgagacaatggaagcagcggtcggggaggtgataggcttgggttttggagagcgaggtggttgatggctggagagaggagtacttcctggaacaagggggctacattgagcatggagagagtgtgagggtttaagacgacgctagggtttcttgggggaagacgagggtaagtgtggacaagacgtccaattgaacacgaagagatagctgagtcaggtttgtgagagagggagtaaatacttttgaccggagtcaatcttagggacgaaggcataggggcgagaagatctttgatagtcaggctcgccgacttgctgcacgccagctgcgtacggggagggcaggtggcgtaagaggccattgaagtcttgcacaggcccgagcagcaaagcaaattttgaattcgaaacattcccgccgtggctgcgtgtggcgcaaaggctatgaggcactatggccatggcagagagctccaagggatatgggcattacgtaacaccatacatgcaccctcctacccacacctatatatccaacatgtgtgttggggggaaagagggaacattacgtaacagcttgatgcgctggtcgatgggacagagaaaggttctcggctgtcgacgaactggtagatgggcaagaccacgatgccacagatgatcctgagcacctgcttggggtctggtagcgacccaccgcctaccacgatgtgcgagatccactccacccaccttgtcacggtcgacaagccaagcacaaatccaataagatttaccacaaaggcgtcgagttgtagcctgattgttttgtgattacatacgctatcctcggggtggaagcaagggtgtaggatgtcattcatgtcgaggtagaggttgacgaactcgaggttggggttgggcttggaggtgtcgatgggaaccgggactccctcgatctcgctgggctcctcctccaccatgtccaccaccaccatcggtgacttctcaactagccaccagtaaaacgctggcgcgcccctatcaccactgactccgccggaatgctaaccctagaagtggtgtttgtgggcgcggatccatgtagaagaggcgcgcaggaagtatagcgggagctcacatggagtgatgggcgagagggctaggaggataaaaacctatatgcagcgtactcgttcgtgcaactggacaggagagaggtaggaccggggttggttaagagggaggttaaaattaataaagaatttgtggtagttggtatagtgtagagatttaaggtgaatatgattgtggaaaattgtgagatagggtagaaaatctcgctgaccagga

SEQ ID NO: 44 - skipped

SEQ ID NO: 45 - DNA, 3492 bp, Artificial Sequence
  Synthetic construct, PY15_RF sequence
ggttctaggcggtgacgtggaagaggtggcgagatcctaggcgatgggggcgaaaactgcaaggtcctaggccatggtagcggtgggaggcgaggtgaagcgcaatggacatagcattctttttgtgattcggtatgggagggagtgtgtaaatagtagcaatacgggtaattaccctacaactccaagaggaggtacaaaataatgattcctggggcaccccttggagctccacaaaaaactgaagttgaggctaggtcctcatttttttatggcgccagagttgaaggtggtttcgttgatgcgatatattaaaaaattacattaccgcctaacatatgaaggattgactatacaacgtcctcaactataaacttaatattatagctacatctaaaattatttaaatggctctctagatggtcttgtaggaccgtttggacaccatatccaattacattgactcatgcatttatacttgcacacatgcacatcggttgtctccatcttcctactatttaaaggtctaccgaacaaatatccgtcaagcaacccaggaggcgatgttgtcgagcaacctactcatcgagcaacccaataaggcgaggctgccgagcgatctgcctgccaagtaacccaccaaggcggggttgccgaacaacctgcccgccgagcaacccagccaaccaaccggtcctccgagcaacctagcaaaacgacagtcgactcataggaagagtcggcctggtacaatcaagccacgacaacatgacgagacatcatcgagccagatccagaccgtgaaaacggcactgagggatctttgtcaaacatgacgacggatacgtatccctgctgacacatgtgaccggacgaccccgaccgtagaaacctcagcatcggggtttctacagtgacccatacaccggaagggatgagacaatatgtcgtatcaagcgtgcatctacgtatgatgaaagatgacgctgctcggaggatgacagaagatgaagttgtatgaacacatccctaaagcactcattgagctgactcaacagaaactaccaggcactgccacgtctaaatcagagtagctataggaaggcggacaggacgtgacgccataccaggggtacggcgcacgcctcgactaacgactctacaagggctacgaggcccaaaagcgtgacccaacagacgagaccaccggggctacgaggcctagaagcaggataccaaactctaccctagtagaatactagtcctcattgtaacgtctatccttggactataaaagggcaatacaaccctcatccaaacatgatcccgtatctctacaacttcacacaagcactcagctgtaacacgttccatcattgtattgtctacccttgggctataaaagggcaagacaacccccatccaaacatgatcctgtatactcagctgtaacacgttccaagcaatatcacaatcagcactgcactggactagggctccggtctgaactagtataaccagcccgcctcagatccacacccatagctcaccattcgaagtgagtccgtgctaacactcccgccgaatacaaatcttattgtccactggttccagaaaccacgacacttatcttaaaaacttatgtttcaacttaatacatattgaagatagtaaaggtgcaatgcaaatgatagcaacaaatatagaatgattggtaaaattatttattagaactaaatagaacatgtatggtatgtacatgggtagagttatgaaataaagagaataaatataattaattttgagtagttatgcatattttaaaaaaccatatagatttatgtgacgcaagattccagacagtgttgaaatgcctttatttgacaatgtttatagagtgataaacatggcaaatagaccatgagatggttatatgagcaagatagtgcttcccgcgcatgtgttcgttactctcccatgtgttccggtccttcgacagcaaacacttaaagcatggacttaacaaagtgcagtaatgcggtctcattatagcacaccccccacataaaaaaacaatatccgcagctagaagacaacacacagcctaagcacgttcagccgaggccaagcaatccgcatccgccccagcccccagcagccctcaccaaccatcattgtgtgtagttgttgggagaggggagggccttgacgaatgacgaggaccaaccacagccccgccgctacagagctacccgccccaacggcgaccaggaagtttccacgccgctggccttgtgacatgcgcacattgtcttggtcgtctttggacaagtctcgactctccacaccaccagcccggtcccttctcagaagcattagctatttaaacctcgccactcctgctggttctctccaggaagagcagcactagatctctctcccctacagcttcccagcaagccagttgcatacatttcactgctgttatctttctcagcttgatcagtgctttagttctctctagttgcaatggcttgcgatttcccgtgcatggcgacgccccgcgccgacccgcttaactgggggaaggcggcggaggagctgatgggcagccacctggacgaggtcaagcggatggtggccgagtaccgccaaccctcggtgaagatcgagggcgccagcctcagcatcgcgcaggtggccgctgtggccaccggcgctggcgaggctcgggtcgagctggacgagtccgcccgtagccgggtcaaggcaagcagcgactgggtcatgagcagcatgatgaacggcaccgacagctacggcgtcaccaccggcttcggcgccacgttgcacaggaggaccaaggagggcggcgctctccagagggagctcatcaggttcctcaacgctggcgccttcggcaccggcacggacggccacgtcctcccggccgaggcgacgcgcgcggccatgctcgtccgcatcaacaccctcctccaggggtactccgggatccgcttcgagatcctcgaggcgatcgtcaagctgctcaacgccaacgtcacgccgtgcctgccgctccgcggcacggtcaccgcgtccggcgacctcgtgccgctctcctacattgccggcctcgtcaccgggcgtgagaactctgttgccctcgccccagacggcagcaaggtgaacgccgccgaggcattcaagattgccggaatccagggcggcttcttcgagctgcagcccaaggagggtcttgcgatggtgaacggcacggccgtgggctctggcctcgcctccactgtgctcttcgaggctaacatccttgccatcctcgccgaggtcctgtccgccgtgttctgcgaagtcatgaacggcaagccggagtacaccgaccacctgacccacaagctcaagcaccacccgggacagatcgaggctgctgccatcatggagcacatcttggagggcagctcctacatgaagctt

SEQ ID NO: 46 - DNA, 4676 bp, Artificial Sequence
  Synthetic construct, pAG4910
ataaaattttagtgaagctaaagcggtgaaagattatagaatttgatgtgccagattaataaatcgattaactcctaaagttcaagccgagactacagacacatgagctacataaatgagccaaggactcgagcaaagacaaatcgacacagacattataattcaagtcattctagaagattcatgagaagagtatcatttatttaaatcaatgacttgatcaaataagacctaggagctactattgataatatatatcatgggtatctagatcaagcattatgaagaagagcctaagtagaaggccccatgggctcgaccacaaacccaaggactcgacaataaagtctaggagggatcccatagctaaaaggactctagaagtgtatgtatggtaaagattttatcgagacaagaaatacgataaagatcttaacagaatcggagtcatacttgtaaaaatagagttggactcgtgtacaacttggtcttcgacttagttcggtcatgaattcagtaaccgactagatatgtaccatggaacccctagggcatgaggctatgagccataggatcatcagatccaaacatacaccaacaaatccatcacacaccgaagatccatattaacaagggattagctactttacaatttcagagtaacaaatagagccaaactcatagcacaggggaacttcatatcacaaatggaggcattgaattgatataaaaagctaaagttctaaaaagtttgaagtgctgaaacttcaaagccgctaactagtgaagcaccgaagccttccggggagagaagacatacacgacacgttagggacgtaaaatgacgaaattatacaactacctctatatgtaacacttatgtaatagaaaagacagaatccatatgaagatgtataatggatcaaccatataaatagataaacaatatatctgctatggggattggcattcttgtatccctacgcctgtatatcccctgtttagagaacctccgaaggtatatgatgctgaagattattgttgtcttgtctttcatcatatatcgagtctttccctaggatattattattcgcaatgtgcattacatggttaatcgattgagagaacatgcatctcacctttagctgataaacgataatccatgttttacacttcgtagctactcatgagtttcgatatacaaatttgttttctggactacgtaccattccatcctcttaggagaggagaggaagtgtcctcgatttaattatgttgtcattttgtagttcttcacaaaatctcaacaggtaccaaacacattgtttccacaagacatattttagtcacaacaaatctatattattattaatcactaaaactatactgaggctcagatgcttttactagctcttgctagtatgtgatgtaggtctctttcgacatcattccatcaaaatcatatgattagcccataccaaacatttctataccattcagagaccagaatagtcttttctaatagaaaaaaggaaaatagagtgggccgacgacgacacaaattactgcgtggaccagaaaatagtgagacacggaagacaaaagaagtaaaagaggcaaggactacggcccacatgagattcggccccgccacctccggcaaccagcggccgatccaacggcagtgcatcctcaacggcgcgcgcgcgcgcgcgcgcgcacaacctcgtatatatcgccgcgcggaagcggcgcgaccgaggaagccttgtcctcgacaccccctacacaggtgtcgcgctgcccccgacacgagtcccgcatgcgtcccacgcggccgcgccagatcccgcctccgcgcgttgccacgccctctataaacacccagctctctccctcgccctcatctatcgcactcgtagtcgtagctcaagcatcagcggcaggagctctgggcagcgtgcgcacgtggggtacctagctcgctctgctagcctaccggatcctaaaccatgagggtgttgctcgttgccctcgctctcctggctctcgctgcgagcgccaccagcaccgcggttcccgccgagccggcgtcgacgctgtccgggccgtcgcggccggtgacggtggcgatcggagacaggggccacgcggtggacctgccggacacggacccgcgggtgcagcgccgcgtcacgggctgggcgcccgagcagatcgccgtcgcgctctccgcctcgcccacctccgcctgggtctcctggatcacaggggactaccagatgggcggcgccgtggagccgctggaccccggcgcggtgggcagcgtcgtgcggtacggcctcgccgccgacgccctcgaccacgaggccaccggggagtcgctcgtgtacagccagctgtacccgttcgagggcctccagaactacacctccggcatcatccaccacgtccgcctccagggcctggagcctgggaccaggtacttgtaccggtgcggcgacccggccatcccggacgccatgagcgacgtgcacgcgttccgcacgatgccggccgtcgggccggggagctacccagggcggatcgccgtggtcggggacctcgggctcacctacaacaccacctcgacggtggaccacttggtgcgcaaccgccccgacctggtgctcctcctcggcgacgtctgctacgccaacctgtacctgaccaacggcaccggggcggactgctactcctgcgccttcgccaagtccacgcccatccacgagacgtaccagccgcgctgggattactggggaaggtacatggagcccgtgacgtcgagcatcccgatgatggtggtggagggcaaccatgagatcgagcagcagatccacaacaggacgttcgcggcctacagctcgcggttcgcgttcccgtcggaggagagcgggtcctcctcgccgttctactactcgttcgacgccggcggcatccacttcgtcatgcttgcgtcctacgccgactacagcagatcaggtgcgcagtacaagtggctggaggcggacctggagaaggtggacaggtcggtgacgccatggctgatcgcgggctggcacgcgccctggtacaccacctacaaggctcactacagggaagccgagtgcatgagggtggagatggaggagctcctctacgcctacggtgtcgacgtcgtcttcaccggccacgtgcacgcgtacgagcggtcgaaccgggtgttcaactacacgctggacgcgtgcggccccgtgcacatctcggtgggcgacggcggcaaccgcgagaagatggcgacggcgcacgcggacgaggcgggccactgcccggacccggcgtcgacgccggaccccttcatggggggccgcctctgcgccgccaacttcacgtcgggccccgccgcgggccgcttctgctgggaccgccagccggagtacagcgcgtacagggagagcagcttcgggcacggcgtcctggaggtcaggaacgacacgcacgcgctctggcggtggcaccgcaaccaggacctccatgccgccgccgccgccaacgtcgccgccgacgaggtctacatcgtcagggagcccgacaagtgcctcgccaagacggccagattgttggcctatagcgagaaggacgagctgtgacctaggggccgccgcgctcgccaaaacgagcaagaagcaacaagagggtggcgcgcgaccgacgtgcgtacgtagcatgagcctgagtggagacgttggacgtgtatgtatatacctctctgcgtgttaactatgtacgtaagcggcaggcagtgcaataagtgtggctctgtagtatgtacgtgcggatacgatgctgtatgctactgaggcaagtcccataaataaataatgacacgtgcgtgttctataatctcttcgcttcttcagtgtccccttgcggagtttggcatccattgatgccgttacactgagaacataacggacacagtagacgaaccacttgagttcttgtatgaaattctgacccttttttttgaaggatcaggagggggaaacccctactggcctggtccttttacaatcaataaaaagaaaagaaaaagaaagaaaaaggaagagctatttctatatttgccacaaatttagccagttcgggattgaggtgtcgaattctccccgtgctctgtgaatgattagtcgcaattctctactaaattcctgagtacagcggagcacggagggatctctgtttgaaaacaaccactcgtttcggcttttccagatgctccaagtcataagaatagtgatctccatagagaagggaacgttgagctggtgtttgaggttcacagatgcctcttcagggttggaaattctgggtggggtaatgccaattgagttccagcaggctttcgcgaagttgcatctgaggaaaagatgataaagggtctcctctctttgccaaaggcagttttcgcaagagtaggaatctagctccatgtttctccttctcaacatatttctggtgtttagcctgttcttaagccacagccaatagaagactctatgcttaggctgacacttacttttccaaactagtttgtagataggatgagtttgcatctggcccatgaaagatctgtaagctttttgggacgacccggg

SEQ ID NO: 47 - DNA, 4039 bp, Artificial Sequence
  Synthetic construct, pAG4902
aaagtaatcatattattttatgtgtgaatcttctttactttttcatttgattatgattatgaaggtatgaccttcataaccttcgtccgaaatccattatatccaaaggaaaataatgcttcgaaggacgaaggattttgatatttaacattttatgttgccttgttcttaattcatagcatttgagaacaagtccccaacaccaatctttatctttactatattaaagcaccagttcaacgatcgtctcgtgtcaatattattaaaaaactcctacatttctttataatcaacccgcactcttataatctcttctcttactactataataagagagtttatgtacaaaataaggtgaaattatgtataagtgttctggaccttggttgttggctcatattcacacaacctaatcaatagaaaacatatgttttattaaaacaaaatttatcatatatatatatatatatatatatatatatatatatatatataatataaaccgtagcaatgcacaggcatatgactagtggcaacttaataccatgtgtgtattaagatgaataagaggtatccaaataaataacttgttcgcttacgtctggatcgaaaggggttggaaacgattaaatctcttcctagtcaaaattaaatagaaggagatttaatcgatttctcccaatccccttcgatccaggtgcaaccgaataagtccttaaatgttgaggaacacgaaacaaccatgcattggcatgtaaagctccaagaattcgttgtatccttaacaactcacagaacatcaaccaaaattgcacgtcaagggtattgggtaagaaacaatcaaacaaatcctctctgtgtgcaaagaaacacggtgagtcatgccgagatcatactcatctgatatacatgcttacagctcacaagacattacaaacaactcatattgcattacaaagatcgtttcatgaaaaataaaataggccggaacaggacaaaaatccttgacgtgtaaagtaaatttacaacaaaaaaaaagccatatgtcaagctaaatctaattcgttttacgtagatcaacaacctgtagaaggcaacaaaactgagccacgcagaagtacagaatgattccagatgaaccatcgacgtgctacgtaaagagagtgacgagtcatatacatttggcaagaaaccatgaagctgcctacagccgtctcggtggcataagaacacaagaaattgtgttaattaatcaaagctataaataacgctcgcatgcctgtgcacttctccatcaccaccactgggtcttcagaccattagctttatctactccagagcgcagaagaacccgatcgacaccggatcctaaaccatgagggtgttgctcgttgccctcgctctcctggctctcgctgcgagcgccaccagcaccgcggttcccgccgagccggcgtcgacgctgtccgggccgtcgcggccggtgacggtggcgatcggagacaggggccacgcggtggacctgccggacacggacccgcgggtgcagcgccgcgtcacgggctgggcgcccgagcagatcgccgtcgcgctctccgcctcgcccacctccgcctgggtctcctggatcacaggggactaccagatgggcggcgccgtggagccgctggaccccggcgcggtgggcagcgtcgtgcggtacggcctcgccgccgacgccctcgaccacgaggccaccggggagtcgctcgtgtacagccagctgtacccgttcgagggcctccagaactacacctccggcatcatccaccacgtccgcctccagggcctggagcctgggaccaggtacttgtaccggtgcggcgacccggccatcccggacgccatgagcgacgtgcacgcgttccgcacgatgccggccgtcgggccggggagctacccagggcggatcgccgtggtcggggacctcgggctcacctacaacaccacctcgacggtggaccacttggtgcgcaaccgccccgacctggtgctcctcctcggcgacgtctgctacgccaacctgtacctgaccaacggcaccggggcggactgctactcctgcgccttcgccaagtccacgcccatccacgagacgtaccagccgcgctgggattactggggaaggtacatggagcccgtgacgtcgagcatcccgatgatggtggtggagggcaaccatgagatcgagcagcagatccacaacaggacgttcgcggcctacagctcgcggttcgcgttcccgtcggaggagagcgggtcctcctcgccgttctactactcgttcgacgccggcggcatccacttcgtcatgcttgcgtcctacgccgactacagcagatcaggtgcgcagtacaagtggctggaggcggacctggagaaggtggacaggtcggtgacgccatggctgatcgcgggctggcacgcgccctggtacaccacctacaaggctcactacagggaagccgagtgcatgagggtggagatggaggagctcctctacgcctacggtgtcgacgtcgtcttcaccggccacgtgcacgcgtacgagcggtcgaaccgggtgttcaactacacgctggacgcgtgcggccccgtgcacatctcggtgggcgacggcggcaaccgcgagaagatggcgacggcgcacgcggacgaggcgggccactgcccggacccggcgtcgacgccggaccccttcatggggggccgcctctgcgccgccaacttcacgtcgggccccgccgcgggccgcttctgctgggaccgccagccggagtacagcgcgtacagggagagcagcttcgggcacggcgtcctggaggtcaggaacgacacgcacgcgctctggcggtggcaccgcaaccaggacctccatgccgccgccgccgccaacgtcgccgccgacgaggtctacatcgtcagggagcccgacaagtgcctcgccaagacggccagattgttggcctatagcgagaaggacgagctgtgacctaggggccgccgcgctcgccaaaacgagcaagaagcaacaagagggtggcgcgcgaccgacgtgcgtacgtagcatgagcctgagtggagacgttggacgtgtatgtatatacctctctgcgtgttaactatgtacgtaagcggcaggcagtgcaataagtgtggctctgtagtatgtacgtgcggatacgatgctgtatgctactgaggcaagtcccataaataaataatgacacgtgcgtgttctataatctcttcgcttcttcagtgtccccttgcggagtttggcatccattgatgccgttacactgagaacataacggacacagtagacgaaccacttgagttcttgtatgaaattctgacccttttttttgaaggatcaggagggggaaacccctactggcctggtccttttacaatcaataaaaagaaaagaaaaagaaagaaaaaggaagagctatttctatatttgccacaaatttagccagttcgggattgaggtgtcgaattctccccgtgctctgtgaatgattagtcgcaattctctactaaattcctgagtacagcggagcacggagggatctctgtttgaaaacaaccactcgtttcggcttttccagatgctccaagtcataagaatagtgatctccatagagaagggaacgttgagctggtgtttgaggttcacagatgcctcttcagggttggaaattctgggtggggtaatgccaattgagttccagcaggctttcgcgaagttgcatctgaggaaaagatgataaagggtctcctctctttgccaaaggcagttttcgcaagagtaggaatctagctccatgtttctccttctcaacatatttctggtgtttagcctgttcttaagccacagccaatagaagactctatgcttaggctgacacttacttttccaaactagtttgtagataggatgagtttgcatctggcccatgaaagatctgtaagctttttgggacgacccggg

SEQ ID NO: 48 - DNA, 4661 bp, Artificial Sequence
  Synthetic construct, pAG4911
ataaaattttagtgaagctaaagcggtgaaagattatagaatttgatgtgccagattaataaatcgattaactcctaaagttcaagccgagactacagacacatgagctacataaatgagccaaggactcgagcaaagacaaatcgacacagacattataattcaagtcattctagaagattcatgagaagagtatcatttatttaaatcaatgacttgatcaaataagacctaggagctactattgataatatatatcatgggtatctagatcaagcattatgaagaagagcctaagtagaaggccccatgggctcgaccacaaacccaaggactcgacaataaagtctaggagggatcccatagctaaaaggactctagaagtgtatgtatggtaaagattttatcgagacaagaaatacgataaagatcttaacagaatcggagtcatacttgtaaaaatagagttggactcgtgtacaacttggtcttcgacttagttcggtcatgaattcagtaaccgactagatatgtaccatggaacccctagggcatgaggctatgagccataggatcatcagatccaaacatacaccaacaaatccatcacacaccgaagatccatattaacaagggattagctactttacaatttcagagtaacaaatagagccaaactcatagcacaggggaacttcatatcacaaatggaggcattgaattgatataaaaagctaaagttctaaaaagtttgaagtgctgaaacttcaaagccgctaactagtgaagcaccgaagccttccggggagagaagacatacacgacacgttagggacgtaaaatgacgaaattatacaactacctctatatgtaacacttatgtaatagaaaagacagaatccatatgaagatgtataatggatcaaccatataaatagataaacaatatatctgctatggggattggcattcttgtatccctacgcctgtatatcccctgtttagagaacctccgaaggtatatgatgctgaagattattgttgtcttgtctttcatcatatatcgagtctttccctaggatattattattcgcaatgtgcattacatggttaatcgattgagagaacatgcatctcacctttagctgataaacgataatccatgttttacacttcgtagctactcatgagtttcgatatacaaatttgttttctggactacgtaccattccatcctcttaggagaggagaggaagtgtcctcgatttaattatgttgtcattttgtagttcttcacaaaatctcaacaggtaccaaacacattgtttccacaagacatattttagtcacaacaaatctatattattattaatcactaaaactatactgaggctcagatgcttttactagctcttgctagtatgtgatgtaggtctctttcgacatcattccatcaaaatcatatgattagcccataccaaacatttctataccattcagagaccagaatagtcttttctaatagaaaaaaggaaaatagagtgggccgacgacgacacaaattactgcgtggaccagaaaatagtgagacacggaagacaaaagaagtaaaagaggcaaggactacggcccacatgagattcggccccgccacctccggcaaccagcggccgatccaacggcagtgcatcctcaacggcgcgcgcgcgcgcgcgcgcgcacaacctcgtatatatcgccgcgcggaagcggcgcgaccgaggaagccttgtcctcgacaccccctacacaggtgtcgcgctgcccccgacacgagtcccgcatgcgtcccacgcggccgcgccagatcccgcctccgcgcgttgccacgccctctataaacacccagctctctccctcgccctcatctatcgcactcgtagtcgtagctcaagcatcagcggcaggagctctgggcagcgtgcgcacgtggggtacctagctcgctctgctagcctaccggatcctaaaccatgagggtgttgctcgttgccctcgctctcctggctctcgctgcgagcgccaccagcgagccggcgtcgacgctgtccgggccgtcgcggccggtgacggtggcgatcggagacaggggccacgcggtggacctgccggacacggacccgcgggtgcagcgccgcgtcacgggctgggcgcccgagcagatcgccgtcgcgctctccgcctcgcccacctccgcctgggtctcctggatcacaggggactaccagatgggcggcgccgtggagccgctggaccccggcgcggtgggcagcgtcgtgcggtacggcctcgccgccgacgccctcgaccacgaggccaccggggagtcgctcgtgtacagccagctgtacccgttcgagggcctccagaactacacctccggcatcatccaccacgtccgcctccagggcctggagcctgggaccaggtacttgtaccggtgcggcgacccggccatcccggacgccatgagcgacgtgcacgcgttccgcacgatgccggccgtcgggccggggagctacccggggcggatcgccgtggtcggggacctcgggctcacctacaacaccacctcgacggtggaccacttggtgcgcaaccgccccgacctggtgctcctcctcggcgacgtctgctacgccaacctgtacctgaccaacggcaccggggcggactgctactcctgcgccttcgccaagtccacgcccatccacgagacgtaccagccgcgctgggattactggggaaggtacatggagcccgtgacgtcgagcatcccgatgatggtggtggagggcaaccatgagatcgagcagcagatccacaacaggacgttcgcggcctacagctcgcggttcgcgttcccgtcggaggagagcgggtcctcctcgccgttctactactcgttcgacgccggcggcatccacttcgtcatgcttgcgtcctacgccgactacagcagatcaggtgcgcagtacaagtggctggaggcggacctggagaaggtggacaggtcggtgacgccatggctgatcgcgggctggcacgcgccctggtacaccacctacaaggctcactacagggaagccgagtgcatgagggtggagatggaggagctcctctacgcctacggtgtcgacgtcgtcttcaccggccacgtgcacgcgtacgagcggtcgaaccgggtgttcaactacacgctggacgcgtgcggccccgtgcacatctcggtgggcgacggcggcaaccgcgagaagatggcgacggcgcacgcggacgaggccggccactgcccggacccggcgtcgacgccggaccccttcatggggggccgcctctgcgccgccaacttcacgtcgggccccgccgcgggccgcttctgctgggaccgccagccggagtacagcgcgtacagggagagcagcttcgggcacggcgtcctggaggtcaggaacgacacgcacgcgctctggcggtggcaccgcaaccaggacctccatgccgccgccgccgccaacgtcgccgccgacgaggtctacatcgtcagggagcccgacaagtgcctcgccaagacggccagattgttggcctatagcgagaaggacgagctgtgacctaggggccgccgcgctcgccaaaacgagcaagaagcaacaagagggtggcgcgcgaccgacgtgcgtacgtagcatgagcctgagtggagacgttggacgtgtatgtatatacctctctgcgtgttaactatgtacgtaagcggcaggcagtgcaataagtgtggctctgtagtatgtacgtgcggatacgatgctgtatgctactgaggcaagtcccataaataaataatgacacgtgcgtgttctataatctcttcgcttcttcagtgtccccttgcggagtttggcatccattgatgccgttacactgagaacataacggacacagtagacgaaccacttgagttcttgtatgaaattctgacccttttttttgaaggatcaggagggggaaacccctactggcctggtccttttacaatcaataaaaagaaaagaaaaagaaagaaaaaggaagagctatttctatatttgccacaaatttagccagttcgggattgaggtgtcgaattctccccgtgctctgtgaatgattagtcgcaattctctactaaattcctgagtacagcggagcacggagggatctctgtttgaaaacaaccactcgtttcggcttttccagatgctccaagtcataagaatagtgatctccatagagaagggaacgttgagctggtgtttgaggttcacagatgcctcttcagggttggaaattctgggtggggtaatgccaattgagttccagcaggctttcgcgaagttgcatctgaggaaaagatgataaagggtctcctctctttgccaaaggcagttttcgcaagagtaggaatctagctccatgtttctccttctcaacatatttctggtgtttagcctgttcttaagccacagccaatagaagactctatgcttaggctgacacttacttttccaaactagtttgtagataggatgagtttgcatctggcccatgaaagatctgtaagctttttgggacgacccggg

SEQ ID NO: 49 - DNA, 4024 bp, Artificial Sequence
  Synthetic construct, pAG4903
aaagtaatcatattattttatgtgtgaatcttctttactttttcatttgattatgattatgaaggtatgaccttcataaccttcgtccgaaatccattatatccaaaggaaaataatgcttcgaaggacgaaggattttgatatttaacattttatgttgccttgttcttaattcatagcatttgagaacaagtccccaacaccaatctttatctttactatattaaagcaccagttcaacgatcgtctcgtgtcaatattattaaaaaactcctacatttctttataatcaacccgcactcttataatctcttctcttactactataataagagagtttatgtacaaaataaggtgaaattatgtataagtgttctggaccttggttgttggctcatattcacacaacctaatcaatagaaaacatatgttttattaaaacaaaatttatcatatatatatatatatatatatatatatatatatatatatataatataaaccgtagcaatgcacaggcatatgactagtggcaacttaataccatgtgtgtattaagatgaataagaggtatccaaataaataacttgttcgcttacgtctggatcgaaaggggttggaaacgattaaatctcttcctagtcaaaattaaatagaaggagatttaatcgatttctcccaatccccttcgatccaggtgcaaccgaataagtccttaaatgttgaggaacacgaaacaaccatgcattggcatgtaaagctccaagaattcgttgtatccttaacaactcacagaacatcaaccaaaattgcacgtcaagggtattgggtaagaaacaatcaaacaaatcctctctgtgtgcaaagaaacacggtgagtcatgccgagatcatactcatctgatatacatgcttacagctcacaagacattacaaacaactcatattgcattacaaagatcgtttcatgaaaaataaaataggccggaacaggacaaaaatccttgacgtgtaaagtaaatttacaacaaaaaaaaagccatatgtcaagctaaatctaattcgttttacgtagatcaacaacctgtagaaggcaacaaaactgagccacgcagaagtacagaatgattccagatgaaccatcgacgtgctacgtaaagagagtgacgagtcatatacatttggcaagaaaccatgaagctgcctacagccgtctcggtggcataagaacacaagaaattgtgttaattaatcaaagctataaataacgctcgcatgcctgtgcacttctccatcaccaccactgggtcttcagaccattagctttatctactccagagcgcagaagaacccgatcgacaccggatcctaaaccatgagggtgttgctcgttgccctcgctctcctggctctcgctgcgagcgccaccagcgagccggcgtcgacgctgtccgggccgtcgcggccggtgacggtggcgatcggagacaggggccacgcggtggacctgccggacacggacccgcgggtgcagcgccgcgtcacgggctgggcgcccgagcagatcgccgtcgcgctctccgcctcgcccacctccgcctgggtctcctggatcacaggggactaccagatgggcggcgccgtggagccgctggaccccggcgcggtgggcagcgtcgtgcggtacggcctcgccgccgacgccctcgaccacgaggccaccggggagtcgctcgtgtacagccagctgtacccgttcgagggcctccagaactacacctccggcatcatccaccacgtccgcctccagggcctggagcctgggaccaggtacttgtaccggtgcggcgacccggccatcccggacgccatgagcgacgtgcacgcgttccgcacgatgccggccgtcgggccggggagctacccggggcggatcgccgtggtcggggacctcgggctcacctacaacaccacctcgacggtggaccacttggtgcgcaaccgccccgacctggtgctcctcctcggcgacgtctgctacgccaacctgtacctgaccaacggcaccggggcggactgctactcctgcgccttcgccaagtccacgcccatccacgagacgtaccagccgcgctgggattactggggaaggtacatggagcccgtgacgtcgagcatcccgatgatggtggtggagggcaaccatgagatcgagcagcagatccacaacaggacgttcgcggcctacagctcgcggttcgcgttcccgtcggaggagagcgggtcctcctcgccgttctactactcgttcgacgccggcggcatccacttcgtcatgcttgcgtcctacgccgactacagcagatcaggtgcgcagtacaagtggctggaggcggacctggagaaggtggacaggtcggtgacgccatggctgatcgcgggctggcacgcgccctggtacaccacctacaaggctcactacagggaagccgagtgcatgagggtggagatggaggagctcctctacgcctacggtgtcgacgtcgtcttcaccggccacgtgcacgcgtacgagcggtcgaaccgggtgttcaactacacgctggacgcgtgcggccccgtgcacatctcggtgggcgacggcggcaaccgcgagaagatggcgacggcgcacgcggacgaggccggccactgcccggacccggcgtcgacgccggaccccttcatggggggccgcctctgcgccgccaacttcacgtcgggccccgccgcgggccgcttctgctgggaccgccagccggagtacagcgcgtacagggagagcagcttcgggcacggcgtcctggaggtcaggaacgacacgcacgcgctctggcggtggcaccgcaaccaggacctccatgccgccgccgccgccaacgtcgccgccgacgaggtctacatcgtcagggagcccgacaagtgcctcgccaagacggccagattgttggcctatagcgagaaggacgagctgtgacctaggggccgccgcgctcgccaaaacgagcaagaagcaacaagagggtggcgcgcgaccgacgtgcgtacgtagcatgagcctgagtggagacgttggacgtgtatgtatatacctctctgcgtgttaactatgtacgtaagcggcaggcagtgcaataagtgtggctctgtagtatgtacgtgcggatacgatgctgtatgctactgaggcaagtcccataaataaataatgacacgtgcgtgttctataatctcttcgcttcttcagtgtccccttgcggagtttggcatccattgatgccgttacactgagaacataacggacacagtagacgaaccacttgagttcttgtatgaaattctgacccttttttttgaaggatcaggagggggaaacccctactggcctggtccttttacaatcaataaaaagaaaagaaaaagaaagaaaaaggaagagctatttctatatttgccacaaatttagccagttcgggattgaggtgtcgaattctccccgtgctctgtgaatgattagtcgcaattctctactaaattcctgagtacagcggagcacggagggatctctgtttgaaaacaaccactcgtttcggcttttccagatgctccaagtcataagaatagtgatctccatagagaagggaacgttgagctggtgtttgaggttcacagatgcctcttcagggttggaaattctgggtggggtaatgccaattgagttccagcaggctttcgcgaagttgcatctgaggaaaagatgataaagggtctcctctctttgccaaaggcagttttcgcaagagtaggaatctagctccatgtttctccttctcaacatatttctggtgtttagcctgttcttaagccacagccaatagaagactctatgcttaggctgacacttacttttccaaactagtttgtagataggatgagtttgcatctggcccatgaaagatctgtaagctttttgggacgacccggg

SEQ ID NO: 50 - DNA, 4181 bp, Artificial Sequence
  Synthetic construct, pAG4908
ataaaattttagtgaagctaaagcggtgaaagattatagaatttgatgtgccagattaataaatcgattaactcctaaagttcaagccgagactacagacacatgagctacataaatgagccaaggactcgagcaaagacaaatcgacacagacattataattcaagtcattctagaagattcatgagaagagtatcatttatttaaatcaatgacttgatcaaataagacctaggagctactattgataatatatatcatgggtatctagatcaagcattatgaagaagagcctaagtagaaggccccatgggctcgaccacaaacccaaggactcgacaataaagtctaggagggatcccatagctaaaaggactctagaagtgtatgtatggtaaagattttatcgagacaagaaatacgataaagatcttaacagaatcggagtcatacttgtaaaaatagagttggactcgtgtacaacttggtcttcgacttagttcggtcatgaattcagtaaccgactagatatgtaccatggaacccctagggcatgaggctatgagccataggatcatcagatccaaacatacaccaacaaatccatcacacaccgaagatccatattaacaagggattagctactttacaatttcagagtaacaaatagagccaaactcatagcacaggggaacttcatatcacaaatggaggcattgaattgatataaaaagctaaagttctaaaaagtttgaagtgctgaaacttcaaagccgctaactagtgaagcaccgaagccttccggggagagaagacatacacgacacgttagggacgtaaaatgacgaaattatacaactacctctatatgtaacacttatgtaatagaaaagacagaatccatatgaagatgtataatggatcaaccatataaatagataaacaatatatctgctatggggattggcattcttgtatccctacgcctgtatatcccctgtttagagaacctccgaaggtatatgatgctgaagattattgttgtcttgtctttcatcatatatcgagtctttccctaggatattattattcgcaatgtgcattacatggttaatcgattgagagaacatgcatctcacctttagctgataaacgataatccatgttttacacttcgtagctactcatgagtttcgatatacaaatttgttttctggactacgtaccattccatcctcttaggagaggagaggaagtgtcctcgatttaattatgttgtcattttgtagttcttcacaaaatctcaacaggtaccaaacacattgtttccacaagacatattttagtcacaacaaatctatattattattaatcactaaaactatactgaggctcagatgcttttactagctcttgctagtatgtgatgtaggtctctttcgacatcattccatcaaaatcatatgattagcccataccaaacatttctataccattcagagaccagaatagtcttttctaatagaaaaaaggaaaatagagtgggccgacgacgacacaaattactgcgtggaccagaaaatagtgagacacggaagacaaaagaagtaaaagaggcaaggactacggcccacatgagattcggccccgccacctccggcaaccagcggccgatccaacggcagtgcatcctcaacggcgcgcgcgcgcgcgcgcgcgcacaacctcgtatatatcgccgcgcggaagcggcgcgaccgaggaagccttgtcctcgacaccccctacacaggtgtcgcgctgcccccgacacgagtcccgcatgcgtcccacgcggccgcgccagatcccgcctccgcgcgttgccacgccctctataaacacccagctctctccctcgccctcatctatcgcactcgtagtcgtagctcaagcatcagcggcaggagctctgggcagcgtgcgcacgtggggtacctagctcgctctgctagcctaccggatcctaaaccatgagggtgttgctcgttgccctcgctctcctggctctcgctgcgagcgccaccagcgccgggatgactgatctgctgatgctgaccgacaagtcgcagctgcaggcgctagcgatgctgctgcggaacaacgaggagctcatgatgagccaagcgatcaagtcggagacggagcgcgttgagtacctcaagacggtgagcgactgctacacgcggacaatgaagctccttgacgactccatggcggccaggatcacgtacgagcgttcgggcggaacgaggagcctcgtcgcgcgggacatggacgactacgtcgtctacggcctcaacgcgtgcttgcagaacgtccgcaactgctgcgtgcgtctggacgccatcgacaagctgcgggcgcactacgacgccctcgccgacgccgtcgccgaaccggccgccaacgtcgagggcctcgccgcggaggcgtccgagtacaaggccgccatgtggcagtactgctacaaccagcggagcgcctccgcgcgggcgcactcccgcgcctactcccaggcgctcaagctggagggcatcgacttcgccgagcttgtgcggaggcaccagctccggctcgggtacggcagcaagggcgaggagttcgaggacctggacgacacccagaagctggaggtgtacaacagcatcatcgtcgagtcggggcgggcggggctaccggtgcggatgttctcgtcgggccgctctgccggtggccctaagattgcagccacgacgtgggcgcaggcggtgagcgtcttcatcatggcggcgggcaacctggcgtgggacgtgttcaccacggagcacgaggtggaggccatcctcaagggcagcctcaacctcctggcggggctagggggcttcgccgtggaggccgtcgtcggcgcggctgtcaccaaggcggtcgcaaacgtcggcgccggcgtctttgcttgctctctcgcgggcttcgtcgtgggcgccatagccgggctgatcttcatcggcgtcagcggcctcctcattaacctcatcatcggctccccgaggaaggtgcctgacatgagcaagctcatgttccacaccgccgtcatgcccgatggaatggcccttgcgtatgcggtatctcatagcgagaaggacgagctgtaacctaggggccgccgcgctcgccaaaacgagcaagaagcaacaagagggtggcgcgcgaccgacgtgcgtacgtagcatgagcctgagtggagacgttggacgtgtatgtatatacctctctgcgtgttaactatgtacgtaagcggcaggcagtgcaataagtgtggctctgtagtatgtacgtgcggatacgatgctgtatgctactgaggcaagtcccataaataaataatgacacgtgcgtgttctataatctcttcgcttcttcagtgtccccttgcggagtttggcatccattgatgccgttacactgagaacataacggacacagtagacgaaccacttgagttcttgtatgaaattctgacccttttttttgaaggatcaggagggggaaacccctactggcctggtccttttacaatcaataaaaagaaaagaaaaagaaagaaaaaggaagagctatttctatatttgccacaaatttagccagttcgggattgaggtgtcgaattctccccgtgctctgtgaatgattagtcgcaattctctactaaattcctgagtacagcggagcacggagggatctctgtttgaaaacaaccactcgtttcggcttttccagatgctccaagtcataagaatagtgatctccatagagaagggaacgttgagctggtgtttgaggttcacagatgcctcttcagggttggaaattctgggtggggtaatgccaattgagttccagcaggctttcgcgaagttgcatctgaggaaaagatgataaagggtctcctctctttgccaaaggcagttttcgcaagagtaggaatctagctccatgtttctccttctcaacatatttctggtgtttagcctgttcttaagccacagccaatagaagactctatgcttaggctgacacttacttttccaaactagtttgtagataggatgagtttgcatctggcccatgaaagatctgtaagctttttgggacgacccggg

SEQ ID NO: 51 - DNA, 3544 bp, Artificial Sequence
  Synthetic construct, pAG4900
aaagtaatcatattattttatgtgtgaatcttctttactttttcatttgattatgattatgaaggtatgaccttcataaccttcgtccgaaatccattatatccaaaggaaaataatgcttcgaaggacgaaggattttgatatttaacattttatgttgccttgttcttaattcatagcatttgagaacaagtccccaacaccaatctttatctttactatattaaagcaccagttcaacgatcgtctcgtgtcaatattattaaaaaactcctacatttctttataatcaacccgcactcttataatctcttctcttactactataataagagagtttatgtacaaaataaggtgaaattatgtataagtgttctggaccttggttgttggctcatattcacacaacctaatcaatagaaaacatatgttttattaaaacaaaatttatcatatatatatatatatatatatatatatatatatatatatataatataaaccgtagcaatgcacaggcatatgactagtggcaacttaataccatgtgtgtattaagatgaataagaggtatccaaataaataacttgttcgcttacgtctggatcgaaaggggttggaaacgattaaatctcttcctagtcaaaattaaatagaaggagatttaatcgatttctcccaatccccttcgatccaggtgcaaccgaataagtccttaaatgttgaggaacacgaaacaaccatgcattggcatgtaaagctccaagaattcgttgtatccttaacaactcacagaacatcaaccaaaattgcacgtcaagggtattgggtaagaaacaatcaaacaaatcctctctgtgtgcaaagaaacacggtgagtcatgccgagatcatactcatctgatatacatgcttacagctcacaagacattacaaacaactcatattgcattacaaagatcgtttcatgaaaaataaaataggccggaacaggacaaaaatccttgacgtgtaaagtaaatttacaacaaaaaaaaagccatatgtcaagctaaatctaattcgttttacgtagatcaacaacctgtagaaggcaacaaaactgagccacgcagaagtacagaatgattccagatgaaccatcgacgtgctacgtaaagagagtgacgagtcatatacatttggcaagaaaccatgaagctgcctacagccgtctcggtggcataagaacacaagaaattgtgttaattaatcaaagctataaataacgctcgcatgcctgtgcacttctccatcaccaccactgggtcttcagaccattagctttatctactccagagcgcagaagaacccgatcgacaccggatcctaaaccatgagggtgttgctcgttgccctcgctctcctggctctcgctgcgagcgccaccagcgccgggatgactgatctgctgatgctgaccgacaagtcgcagctgcaggcgctagcgatgctgctgcggaacaacgaggagctcatgatgagccaagcgatcaagtcggagacggagcgcgttgagtacctcaagacggtgagcgactgctacacgcggacaatgaagctccttgacgactccatggcggccaggatcacgtacgagcgttcgggcggaacgaggagcctcgtcgcgcgggacatggacgactacgtcgtctacggcctcaacgcgtgcttgcagaacgtccgcaactgctgcgtgcgtctggacgccatcgacaagctgcgggcgcactacgacgccctcgccgacgccgtcgccgaaccggccgccaacgtcgagggcctcgccgcggaggcgtccgagtacaaggccgccatgtggcagtactgctacaaccagcggagcgcctccgcgcgggcgcactcccgcgcctactcccaggcgctcaagctggagggcatcgacttcgccgagcttgtgcggaggcaccagctccggctcgggtacggcagcaagggcgaggagttcgaggacctggacgacacccagaagctggaggtgtacaacagcatcatcgtcgagtcggggcgggcggggctaccggtgcggatgttctcgtcgggccgctctgccggtggccctaagattgcagccacgacgtgggcgcaggcggtgagcgtcttcatcatggcggcgggcaacctggcgtgggacgtgttcaccacggagcacgaggtggaggccatcctcaagggcagcctcaacctcctggcggggctagggggcttcgccgtggaggccgtcgtcggcgcggctgtcaccaaggcggtcgcaaacgtcggcgccggcgtctttgcttgctctctcgcgggcttcgtcgtgggcgccatagccgggctgatcttcatcggcgtcagcggcctcctcattaacctcatcatcggctccccgaggaaggtgcctgacatgagcaagctcatgttccacaccgccgtcatgcccgatggaatggcccttgcgtatgcggtatctcatagcgagaaggacgagctgtaacctaggggccgccgcgctcgccaaaacgagcaagaagcaacaagagggtggcgcgcgaccgacgtgcgtacgtagcatgagcctgagtggagacgttggacgtgtatgtatatacctctctgcgtgttaactatgtacgtaagcggcaggcagtgcaataagtgtggctctgtagtatgtacgtgcggatacgatgctgtatgctactgaggcaagtcccataaataaataatgacacgtgcgtgttctataatctcttcgcttcttcagtgtccccttgcggagtttggcatccattgatgccgttacactgagaacataacggacacagtagacgaaccacttgagttcttgtatgaaattctgacccttttttttgaaggatcaggagggggaaacccctactggcctggtccttttacaatcaataaaaagaaaagaaaaagaaagaaaaaggaagagctatttctatatttgccacaaatttagccagttcgggattgaggtgtcgaattctccccgtgctctgtgaatgattagtcgcaattctctactaaattcctgagtacagcggagcacggagggatctctgtttgaaaacaaccactcgtttcggcttttccagatgctccaagtcataagaatagtgatctccatagagaagggaacgttgagctggtgtttgaggttcacagatgcctcttcagggttggaaattctgggtggggtaatgccaattgagttccagcaggctttcgcgaagttgcatctgaggaaaagatgataaagggtctcctctctttgccaaaggcagttttcgcaagagtaggaatctagctccatgtttctccttctcaacatatttctggtgtttagcctgttcttaagccacagccaatagaagactctatgcttaggctgacacttacttttccaaactagtttgtagataggatgagtttgcatctggcccatgaaagatctgtaagctttttgggacgacccggg

SEQ ID NO: 52 - DNA, 4184 bp, Artificial Sequence
  Synthetic construct, pAG4909
ataaaattttagtgaagctaaagcggtgaaagattatagaatttgatgtgccagattaataaatcgattaactcctaaagttcaagccgagactacagacacatgagctacataaatgagccaaggactcgagcaaagacaaatcgacacagacattataattcaagtcattctagaagattcatgagaagagtatcatttatttaaatcaatgacttgatcaaataagacctaggagctactattgataatatatatcatgggtatctagatcaagcattatgaagaagagcctaagtagaaggccccatgggctcgaccacaaacccaaggactcgacaataaagtctaggagggatcccatagctaaaaggactctagaagtgtatgtatggtaaagattttatcgagacaagaaatacgataaagatcttaacagaatcggagtcatacttgtaaaaatagagttggactcgtgtacaacttggtcttcgacttagttcggtcatgaattcagtaaccgactagatatgtaccatggaacccctagggcatgaggctatgagccataggatcatcagatccaaacatacaccaacaaatccatcacacaccgaagatccatattaacaagggattagctactttacaatttcagagtaacaaatagagccaaactcatagcacaggggaacttcatatcacaaatggaggcattgaattgatataaaaagctaaagttctaaaaagtttgaagtgctgaaacttcaaagccgctaactagtgaagcaccgaagccttccggggagagaagacatacacgacacgttagggacgtaaaatgacgaaattatacaactacctctatatgtaacacttatgtaatagaaaagacagaatccatatgaagatgtataatggatcaaccatataaatagataaacaatatatctgctatggggattggcattcttgtatccctacgcctgtatatcccctgtttagagaacctccgaaggtatatgatgctgaagattattgttgtcttgtctttcatcatatatcgagtctttccctaggatattattattcgcaatgtgcattacatggttaatcgattgagagaacatgcatctcacctttagctgataaacgataatccatgttttacacttcgtagctactcatgagtttcgatatacaaatttgttttctggactacgtaccattccatcctcttaggagaggagaggaagtgtcctcgatttaattatgttgtcattttgtagttcttcacaaaatctcaacaggtaccaaacacattgtttccacaagacatattttagtcacaacaaatctatattattattaatcactaaaactatactgaggctcagatgcttttactagctcttgctagtatgtgatgtaggtctctttcgacatcattccatcaaaatcatatgattagcccataccaaacatttctataccattcagagaccagaatagtcttttctaatagaaaaaaggaaaatagagtgggccgacgacgacacaaattactgcgtggaccagaaaatagtgagacacggaagacaaaagaagtaaaagaggcaaggactacggcccacatgagattcggccccgccacctccggcaaccagcggccgatccaacggcagtgcatcctcaacggcgcgcgcgcgcgcgcgcgcgcacaacctcgtatatatcgccgcgcggaagcggcgcgaccgaggaagccttgtcctcgacaccccctacacaggtgtcgcgctgcccccgacacgagtcccgcatgcgtcccacgcggccgcgccagatcccgcctccgcgcgttgccacgccctctataaacacccagctctctccctcgccctcatctatcgcactcgtagtcgtagctcaagcatcagcggcaggagctctgggcagcgtgcgcacgtggggtacctagctcgctctgctagcctaccggatcctaaaccatgagggtgttgctcgttgccctcgctctcctggctctcgctgcgagcgccaccagcgccgggatgactgatctgctgatgctgaccgacaagtcgcagctgcaggcgctggcgatgctgctgcggaacaacgaggagctcatgatgagccaggcgatcaagtcggagacggagcgcattgagtacctcaagacggtgagcgactgctacacgcggacgatgaagctcctcgacgattccatggcggccaggaccacgtacgagcgttcgggcggaacgaggagcctcgtcgcgcgggacatggacgactacgtcgtctacggcctcaacgcgtgcttgcagaacgtccgcaactgctgcgtgcgcctggacgccatcgacaagctgcgggcgcactacgacgccctcgccgacgccgtcgccgacccggccgccaacgtcgagggcctcgccgcggaggcgtccgagtacaaggccgccatgtggcagtactgctacaaccagcggagcgcctccgcgcgggcgcactcccgcgcctactcccaggcgctcaagctggagggcatcgacttcgccgagctggtgcggaggcaccagctccggctcgggtacggcagcaagggcgaggagttcgaggacctggacgacacccagaagctggaggtgtacaaacagcatcatcgtcgagtcggggcggggcgggggctaccggtgcggatgttctcgtcgggccgctctgccggtggccctaagattgcagccacgacgtgggcggaggcggtgagcgtcttcatcatggcggcgggcaacctggcgtgggacgtgttcaccacggagcacgaggtggaggccatcctcaagggcagcctcaacctcctggcggggctagggggcttcgccgtggaggccgtcgtcggcgcggctgtcaccaaggcggtcgcaaacgtcggcgccggcgtctttgcttgctctctcgccggcttcgtcgtgggcgccatcgccgggctgatcttcgtcggcgtcagcggcctcctcattaacctcatcatcggctccccaaggaaggtgcctgacatgagcaagctcatgttccacaccgccgtcatgcccgatggaatggcccttgcgtatgcggtatctcatagcgagaaggacgagctgtaacctaggggccgccgcgctcgccaaaacgagcaagaagcaacaagagggtggcgcgcgaccgacgtgcgtacgtagcatgagcctgagtggagacgttggacgtgtatgtatatacctctctgcgtgttaactatgtacgtaagcggcaggcagtgcaataagtgtggctctgtagtatgtacgtgcggatacgatgctgtatgctactgaggcaagtcccataaataaataatgacacgtgcgtgttctataatctcttcgcttcttcagtgtccccttgcggagtttggcatccattgatgccgttacactgagaacataacggacacagtagacgaaccacttgagttcttgtatgaaattctgacccttttttttgaaggatcaggagggggaaacccctactggcctggtccttttacaatcaataaaaagaaaagaaaaagaaagaaaaaggaagagctatttctatatttgccacaaatttagccagttcgggattgaggtgtcgaattctccccgtgctctgtgaatgattagtcgcaattctctactaaattcctgagtacagcggagcacggagggatctctgtttgaaaacaaccactcgtttcggcttttccagatgctccaagtcataagaatagtgatctccatagagaagggaacgttgagctggtgtttgaggttcacagatgcctcttcagggttggaaattctgggtggggtaatgccaattgagttccagcaggctttcgcgaagttgcatctgaggaaaagatgataaagggtctcctctctttgccaaaggcagttttcgcaagagtaggaatctagctccatgtttctccttctcaacatatttctggtgtttagcctgttcttaagccacagccaatagaagactctatgcttaggctgacacttacttttccaaactagtttgtagataggatgagtttgcatctggcccatgaaagatctgtaagctttttgggacgacccggg

SEQ ID NO: 53 - DNA, 3547 bp, Artificial Sequence
  Synthetic construct, pAG4901
aaagtaatcatattattttatgtgtgaatcttctttactttttcatttgattatgattatgaaggtatgaccttcataaccttcgtccgaaatccattatatccaaaggaaaataatgcttcgaaggacgaaggattttgatatttaacattttatgttgccttgttcttaattcatagcatttgagaacaagtccccaacaccaatctttatctttactatattaaagcaccagttcaacgatcgtctcgtgtcaatattattaaaaaactcctacatttctttataatcaacccgcactcttataatctcttctcttactactataataagagagtttatgtacaaaataaggtgaaattatgtataagtgttctggaccttggttgttggctcatattcacacaacctaatcaatagaaaacatatgttttattaaaacaaaatttatcatatatatatatatatatatatatatatatatatatatatataatataaaccgtagcaatgcacaggcatatgactagtggcaacttaataccatgtgtgtattaagatgaataagaggtatccaaataaataacttgttcgcttacgtctggatcgaaaggggttggaaacgattaaatctcttcctagtcaaaattaaatagaaggagatttaatcgatttctcccaatccccttcgatccaggtgcaaccgaataagtccttaaatgttgaggaacacgaaacaaccatgcattggcatgtaaagctccaagaattcgttgtatccttaacaactcacagaacatcaaccaaaattgcacgtcaagggtattgggtaagaaacaatcaaacaaatcctctctgtgtgcaaagaaacacggtgagtcatgccgagatcatactcatctgatatacatgcttacagctcacaagacattacaaacaactcatattgcattacaaagatcgtttcatgaaaaataaaataggccggaacaggacaaaaatccttgacgtgtaaagtaaatttacaacaaaaaaaaagccatatgtcaagctaaatctaattcgttttacgtagatcaacaacctgtagaaggcaacaaaactgagccacgcagaagtacagaatgattccagatgaaccatcgacgtgctacgtaaagagagtgacgagtcatatacatttggcaagaaaccatgaagctgcctacagccgtctcggtggcataagaacacaagaaattgtgttaattaatcaaagctataaataacgctcgcatgcctgtgcacttctccatcaccaccactgggtcttcagaccattagctttatctactccagagcgcagaagaacccgatcgacaccggatcctaaaccatgagggtgttgctcgttgccctcgctctcctggctctcgctgcgagcgccaccagcgccgggatgactgatctgctgatgctgaccgacaagtcgcagctgcaggcgctggcgatgctgctgcggaacaacgaggagctcatgatgagccaggcgatcaagtcggagacggagcgcattgagtacctcaagacggtgagcgactgctacacgcggacgatgaagctcctcgacgattccatggcggccaggaccacgtacgagcgttcgggcggaacgaggagcctcgtcgcgcgggacatggacgactacgtcgtctacggcctcaacgcgtgcttgcagaacgtccgcaactgctgcgtgcgcctggacgccatcgacaagctgcgggcgcactacgacgccctcgccgacgccgtcgccgacccggccgccaacgtcgagggcctcgccgcggaggcgtccgagtacaaggccgccatgtggcagtactgctacaaccagcggagcgcctccgcgcgggcgcactcccgcgcctactcccaggcgctcaagctggagggcatcgacttcgccgagctggtgcggaggcaccagctccggctcgggtacggcagcaagggcgaggagttcgaggacctggacgacacccagaagctggaggtgtacaaacagcatcatcgtcgagtcggggcggggcgggggctaccggtgcggatgttctcgtcgggccgctctgccggtggccctaagattgcagccacgacgtgggcggaggcggtgagcgtcttcatcatggcggcgggcaacctggcgtgggacgtgttcaccacggagcacgaggtggaggccatcctcaagggcagcctcaacctcctggcggggctagggggcttcgccgtggaggccgtcgtcggcgcggctgtcaccaaggcggtcgcaaacgtcggcgccggcgtctttgcttgctctctcgccggcttcgtcgtgggcgccatcgccgggctgatcttcgtcggcgtcagcggcctcctcattaacctcatcatcggctccccaaggaaggtgcctgacatgagcaagctcatgttccacaccgccgtcatgcccgatggaatggcccttgcgtatgcggtatctcatagcgagaaggacgagctgtaacctaggggccgccgcgctcgccaaaacgagcaagaagcaacaagagggtggcgcgcgaccgacgtgcgtacgtagcatgagcctgagtggagacgttggacgtgtatgtatatacctctctgcgtgttaactatgtacgtaagcggcaggcagtgcaataagtgtggctctgtagtatgtacgtgcggatacgatgctgtatgctactgaggcaagtcccataaataaataatgacacgtgcgtgttctataatctcttcgcttcttcagtgtccccttgcggagtttggcatccattgatgccgttacactgagaacataacggacacagtagacgaaccacttgagttcttgtatgaaattctgacccttttttttgaaggatcaggagggggaaacccctactggcctggtccttttacaatcaataaaaagaaaagaaaaagaaagaaaaaggaagagctatttctatatttgccacaaatttagccagttcgggattgaggtgtcgaattctccccgtgctctgtgaatgattagtcgcaattctctactaaattcctgagtacagcggagcacggagggatctctgtttgaaaacaaccactcgtttcggcttttccagatgctccaagtcataagaatagtgatctccatagagaagggaacgttgagctggtgtttgaggttcacagatgcctcttcagggttggaaattctgggtggggtaatgccaattgagttccagcaggctttcgcgaagttgcatctgaggaaaagatgataaagggtctcctctctttgccaaaggcagttttcgcaagagtaggaatctagctccatgtttctccttctcaacatatttctggtgtttagcctgttcttaagccacagccaatagaagactctatgcttaggctgacacttacttttccaaactagtttgtagataggatgagtttgcatctggcccatgaaagatctgtaagctttttgggacgacccggg

SEQ ID NO: 54 - DNA, 3605 bp, Artificial Sequence
  Synthetic construct, pAG4728
ataaaattttagtgaagctaaagcggtgaaagattatagaatttgatgtgccagattaataaatcgattaactcctaaagttcaagccgagactacagacacatgagctacataaatgagccaaggactcgagcaaagacaaatcgacacagacattataattcaagtcattctagaagattcatgagaagagtatcatttatttaaatcaatgacttgatcaaataagacctaggagctactattgataatatatatcatgggtatctagatcaagcattatgaagaagagcctaagtagaaggccccatgggctcgaccacaaacccaaggactcgacaataaagtctaggagggatcccatagctaaaaggactctagaagtgtatgtatggtaaagattttatcgagacaagaaatacgataaagatcttaacagaatcggagtcatacttgtaaaaatagagttggactcgtgtacaacttggtcttcgacttagttcggtcatgaattcagtaaccgactagatatgtaccatggaacccctagggcatgaggctatgagccataggatcatcagatccaaacatacaccaacaaatccatcacacaccgaagatccatattaacaagggattagctactttacaatttcagagtaacaaatagagccaaactcatagcacaggggaacttcatatcacaaatggaggcattgaattgatataaaaagctaaagttctaaaaagtttgaagtgctgaaacttcaaagccgctaactagtgaagcaccgaagccttccggggagagaagacatacacgacacgttagggacgtaaaatgacgaaattatacaactacctctatatgtaacacttatgtaatagaaaagacagaatccatatgaagatgtataatggatcaaccatataaatagataaacaatatatctgctatggggattggcattcttgtatccctacgcctgtatatcccctgtttagagaacctccgaaggtatatgatgctgaagattattgttgtcttgtctttcatcatatatcgagtctttccctaggatattattattcgcaatgtgcattacatggttaatcgattgagagaacatgcatctcacctttagctgataaacgataatccatgttttacacttcgtagctactcatgagtttcgatatacaaatttgttttctggactacgtaccattccatcctcttaggagaggagaggaagtgtcctcgatttaattatgttgtcattttgtagttcttcacaaaatctcaacaggtaccaaacacattgtttccacaagacatattttagtcacaacaaatctatattattattaatcactaaaactatactgaggctcagatgcttttactagctcttgctagtatgtgatgtaggtctctttcgacatcattccatcaaaatcatatgattagcccataccaaacatttctataccattcagagaccagaatagtcttttctaatagaaaaaaggaaaatagagtgggccgacgacgacacaaattactgcgtggaccagaaaatagtgagacacggaagacaaaagaagtaaaagaggcaaggactacggcccacatgagattcggccccgccacctccggcaaccagcggccgatccaacggcagtgcatcctcaacggcgcgcgcgcgcgcgcgcgcgcacaacctcgtatatatcgccgcgcggaagcggcgcgaccgaggaagccttgtcctcgacaccccctacacaggtgtcgcgctgcccccgacacgagtcccgcatgcgtcccacgcggccgcgccagatcccgcctccgcgcgttgccacgccctctataaacacccagctctctccctcgccctcatctatcgcactcgtagtcgtagctcaagcatcagcggcaggagctctgggcagcgtgcgcacgtggggtacctagctcgctctgctagcctaccggatcctaaaccatgcgcgtgctgctcgtggccctggccctgctggctcttgctgccagcgccacctctgcccagagcgagccggagctgaagctggagagcgtggtgatcgtgagcaggcacggcgtgagggccccgaccaagttcacccagctgatgcaggacgtgaccccggacgcgttctacacctggccggtgaagctgggcgagctgaccccgaggggcggcgagctgatcgcctacctgggccactactggaggcagaggctggtggccgacggcctgctgccgaagaagggctgcccgcagagcggccaggtggccatcatcgccgacgtggacgagaggaccaggaagaccggtgaggccttcgccgccggcctggccccggactgcgccatcaccgtgcacacccaggccgacaccagcagcccggacccgctgttcaacccgctgaagaccggcgtgtgccagctggacgtggcccaggtgaccgacgccatcctggagagggccggcggcagcatcgccgacttcaccggccactaccagaccgccttcagggagctggagagggtgctgaacttcccgcagagcaacctggccctgaagagggagaagcaggacgagagcgccagcctgacccaggccctgccgagcgagctgaaggtgagcgccgacaacgtgagcctgaccggcgcctggagcctggccagcatgctgaccgagattttcctgctgcagcaggcccagggcatgccggagccgggctggggcaggatcaccgacagccaccagtggaacaccctgctgagcctgcacaacgcccagttcgacctgctgcagaggaccccggaggtggccaggagcagggccaccccgctgctggacctgatcaagaccgccctgaccccgcacccgccgcagaagcaggcctacggcgtgaccctgccgaccagcgtgctgttcatcgccggccacgacaccaacctggccaacctgggcggcgccctcgagctgcagtggaccctgccgggccagccggacaacaccccgccgggcggcgagctggtgttcgagaggtggaggaggctgagcgacaacagccagtggattcaggtgagcctggtgttccagaccctgcagcagatgagggacaagaccccgctgttcctgaacaccccgccgggcgaggtgaagctgaccctggccggctgcgaggagaggaacgcccagggcatgtgcagcctggccggcttcacccagatcgtgaacgaggccaggattccggcctgcagcctgagcgagaaggacgagctgtgacctaggtccccgaatttccccgatcgttcaaacatttggcaataaagtttcttaagattgaatcctgttgccggtcttgcgatgattatcatataatttctgttgaattacgttaagcatgtaataattaacatgtaatgcatgacgttatttatgagatgggtttttatgattagagtcccgcaattatacatttaatacgcgatagaaaacaaaatatagcgcgcaaactaggataaattatcgcgcgcggtgtcatctatgttactagatcgggaattg

SEQ ID NO: 55 - DNA, 3611 bp, Artificial Sequence
  Synthetic construct, pAG4813
ataaaattttagtgaagctaaagcggtgaaagattatagaatttgatgtgccagattaataaatcgattaactcctaaagttcaagccgagactacagacacatgagctacataaatgagccaaggactcgagcaaagacaaatcgacacagacattataattcaagtcattctagaagattcatgagaagagtatcatttatttaaatcaatgacttgatcaaataagacctaggagctactattgataatatatatcatgggtatctagatcaagcattatgaagaagagcctaagtagaaggccccatgggctcgaccacaaacccaaggactcgacaataaagtctaggagggatcccatagctaaaaggactctagaagtgtatgtatggtaaagattttatcgagacaagaaatacgataaagatcttaacagaatcggagtcatacttgtaaaaatagagttggactcgtgtacaacttggtcttcgacttagttcggtcatgaattcagtaaccgactagatatgtaccatggaacccctagggcatgaggctatgagccataggatcatcagatccaaacatacaccaacaaatccatcacacaccgaagatccatattaacaagggattagctactttacaatttcagagtaacaaatagagccaaactcatagcacaggggaacttcatatcacaaatggaggcattgaattgatataaaaagctaaagttctaaaaagtttgaagtgctgaaacttcaaagccgctaactagtgaagcaccgaagccttccggggagagaagacatacacgacacgttagggacgtaaaatgacgaaattatacaactacctctatatgtaacacttatgtaatagaaaagacagaatccatatgaagatgtataatggatcaaccatataaatagataaacaatatatctgctatggggattggcattcttgtatccctacgcctgtatatcccctgtttagagaacctccgaaggtatatgatgctgaagattattgttgtcttgtctttcatcatatatcgagtctttccctaggatattattattcgcaatgtgcattacatggttaatcgattgagagaacatgcatctcacctttagctgataaacgataatccatgttttacacttcgtagctactcatgagtttcgatatacaaatttgttttctggactacgtaccattccatcctcttaggagaggagaggaagtgtcctcgatttaattatgttgtcattttgtagttcttcacaaaatctcaacaggtaccaaacacattgtttccacaagacatattttagtcacaacaaatctatattattattaatcactaaaactatactgaggctcagatgcttttactagctcttgctagtatgtgatgtaggtctctttcgacatcattccatcaaaatcatatgattagcccataccaaacatttctataccattcagagaccagaatagtcttttctaatagaaaaaaggaaaatagagtgggccgacgacgacacaaattactgcgtggaccagaaaatagtgagacacggaagacaaaagaagtaaaagaggcaaggactacggcccacatgagattcggccccgccacctccggcaaccagcggccgatccaacggcagtgcatcctcaacggcgcgcgcgcgcgcgcgcgcgcacaacctcgtatatatcgccgcgcggaagcggcgcgaccgaggaagccttgtcctcgacaccccctacacaggtgtcgcgctgcccccgacacgagtcccgcatgcgtcccacgcggccgcgccagatcccgcctccgcgcgttgccacgccctctataaacacccagctctctccctcgccctcatctatcgcactcgtagtcgtagctcaagcatcagcggcaggagctctgggcagcgtgcgcacgtggggtacctagctcgctctgctagcctaccggatcctaaaccatgcgcgtgctgctcgtggccctggccctgctggctcttgctgccagcgccacctctgcccagagcgagccggagctgaagctggagagcgtggtgatcgtgagcaggcacggcgtgagggccccgaccaagttcacccagctgatgcaggacgtgaccccggacgcgttctacacctggccggtgaagctgggcgagctgaccccgaggggcggcgagctgatcgcctacctgggccactactggaggcagaggctggtggccgacggcctgctgccgaagaagggctgcccgcagagcggccaggtggccatcatcgccgacgtggacgagaggaccaggaagaccggtgaggccttcgccgccggcctggccccggactgcgccatcaccgtgcacacccaggccgacaccagcagcccggacccgctgttcaacccgctgaagaccggcgtgtgccagctggacgtggcccaggtgaccgacgccatcctggagagggccggcggcagcatcgccgacttcaccggccactaccagaccgccttcagggagctggagagggtgctgaacttcccgcagagcaacctggccctgaagagggagaagcaggacgagagcgccagcctgacccaggccctgccgagcgagctgaaggtgagcgccgacaacgtgagcctgaccggcgcctggagcctggccagcatgctgaccgagattttcctgctgcagcaggcccagggcatgccggagccgggctggggcaggatcaccgacagccaccagtggaacaccctgctgagcctgcacaacgcccagttcgacctgctgcagaggaccccggaggtggccaggagcagggccaccccgctgctggacctgatcaagaccgccctgaccccgcacccgccgcagaagcaggcctacggcgtgaccctgccgaccagcgtgctgttcatcgccggccacgacaccaacctggccaacctgggcggcgccctcgagctgcagtggaccctgccgggccagccggacaacaccccgccgggcggcgagctggtgttcgagaggtggaggaggctgagcgacaacagccagtggattcaggtgagcctggtgttccagaccctgcagcagatgagggacaagaccccgctgttcctgaacaccccgccgggcgaggtgaagctgaccctggccggctgcgaggagaggaacgcccagggcatgtgcagcctggccggcttcacccagatcgtgaacgaggccaggattccggcctgcagcctggacgagctgaaggccgaggccaagtgacctaggtccccgaatttccccgatcgttcaaacatttggcaataaagtttcttaagattgaatcctgttgccggtcttgcgatgattatcatataatttctgttgaattacgttaagcatgtaataattaacatgtaatgcatgacgttatttatgagatgggtttttatgattagagtcccgcaattatacatttaatacgcgatagaaaacaaaatatagcgcgcaaactaggataaattatcgcgcgcggtgtcatctatgttactagatcgggaattg

SEQ ID NO: 56 - DNA, 3605 bp, Artificial Sequence
  Synthetic construct, pAG4729
ataaaattttagtgaagctaaagcggtgaaagattatagaatttgatgtgccagattaataaatcgattaactcctaaagttcaagccgagactacagacacatgagctacataaatgagccaaggactcgagcaaagacaaatcgacacagacattataattcaagtcattctagaagattcatgagaagagtatcatttatttaaatcaatgacttgatcaaataagacctaggagctactattgataatatatatcatgggtatctagatcaagcattatgaagaagagcctaagtagaaggccccatgggctcgaccacaaacccaaggactcgacaataaagtctaggagggatcccatagctaaaaggactctagaagtgtatgtatggtaaagattttatcgagacaagaaatacgataaagatcttaacagaatcggagtcatacttgtaaaaatagagttggactcgtgtacaacttggtcttcgacttagttcggtcatgaattcagtaaccgactagatatgtaccatggaacccctagggcatgaggctatgagccataggatcatcagatccaaacatacaccaacaaatccatcacacaccgaagatccatattaacaagggattagctactttacaatttcagagtaacaaatagagccaaactcatagcacaggggaacttcatatcacaaatggaggcattgaattgatataaaaagctaaagttctaaaaagtttgaagtgctgaaacttcaaagccgctaactagtgaagcaccgaagccttccggggagagaagacatacacgacacgttagggacgtaaaatgacgaaattatacaactacctctatatgtaacacttatgtaatagaaaagacagaatccatatgaagatgtataatggatcaaccatataaatagataaacaatatatctgctatggggattggcattcttgtatccctacgcctgtatatcccctgtttagagaacctccgaaggtatatgatgctgaagattattgttgtcttgtctttcatcatatatcgagtctttccctaggatattattattcgcaatgtgcattacatggttaatcgattgagagaacatgcatctcacctttagctgataaacgataatccatgttttacacttcgtagctactcatgagtttcgatatacaaatttgttttctggactacgtaccattccatcctcttaggagaggagaggaagtgtcctcgatttaattatgttgtcattttgtagttcttcacaaaatctcaacaggtaccaaacacattgtttccacaagacatattttagtcacaacaaatctatattattattaatcactaaaactatactgaggctcagatgcttttactagctcttgctagtatgtgatgtaggtctctttcgacatcattccatcaaaatcatatgattagcccataccaaacatttctataccattcagagaccagaatagtcttttctaatagaaaaaaggaaaatagagtgggccgacgacgacacaaattactgcgtggaccagaaaatagtgagacacggaagacaaaagaagtaaaagaggcaaggactacggcccacatgagattcggccccgccacctccggcaaccagcggccgatccaacggcagtgcatcctcaacggcgcgcgcgcgcgcgcgcgcgcacaacctcgtatatatcgccgcgcggaagcggcgcgaccgaggaagccttgtcctcgacaccccctacacaggtgtcgcgctgcccccgacacgagtcccgcatgcgtcccacgcggccgcgccagatcccgcctccgcgcgttgccacgccctctataaacacccagctctctccctcgccctcatctatcgcactcgtagtcgtagctcaagcatcagcggcaggagctctgggcagcgtgcgcacgtggggtacctagctcgctctgctagcctaccggatcctaaaccatgcgcgtgctgctcgtggccctggccctgctggctcttgctgccagcgccacctctgcccagagcgagccggagctgaagctggagagcgtggtgatcgtgagcaggcacggcgtgagggccccgaccaaggccacccagctgatgcaggacgtgaccccggacgcgttctacacctggccggtgaagctgggcgagctgaccccgaggggcggcgagctgatcgcctacctgggccactactggaggcagaggctggtggccgacggcctgctgccgaagaagggctgcccgcagagcggccaggtggccatcatcgccgacgtggacgagaggaccaggaagaccggcgaggccttcgccgccggcctggccccggactgcgccatcaccgtgcacacccaggccgacaccagcagcccggacccgctgttcaacccgctgaagaccggcgtgtgccagctggacaacgcccaggtgaccgacgccatcctggagagggccggcggcagcatcgccgacttcaccggccactaccagaccgccttcagggagctggagagggtgctgaacttcccgcagagcaacctgtgcctgaagagggagaagcaggacgagagctgcagcctgacccaggccctgccgagcgagctgaaggtgagcgccgacaacgtgagcctgaccggcgccgtgagcctggccagcatgctgaccgagattttcctgctgcagcaggcccagggcatgccggagccgggctggggcaggatcaccgacagccaccagtggaacaccctgctgagcctgcacaacgcccagttcgacctgctgcagaggaccccggaggtggccaggagcagggccaccccgctgctggacctgatcaagaccgccctgaccccgcacccgccgcagaagcaggcctacggcgtgaccctgccgaccagcgtgctgttcatcgccggccacgacaccaacctggccaacctgggcggcgccctcgagctgcagtggaccctgccgggccagccggacaacaccccgccgggcggcgagctggtgttcgagaggtggaggaggctgagcgacaacagccagtggattcaggtgagcctggtgttccagaccctgcagcagatgagggacaagaccccgctgtccctgaacaccccgccgggcgaggtgaagctgaccctggccggctgcgaggagaggaacgcccagggcatgtgcagcctggccggcttcacccagatcgtgaacgaggccaggattccggcctgcagcctgagcgagaaggacgagctgtgacctaggtccccgaatttccccgatcgttcaaacatttggcaataaagtttcttaagattgaatcctgttgccggtcttgcgatgattatcatataatttctgttgaattacgttaagcatgtaataattaacatgtaatgcatgacgttatttatgagatgggtttttatgattagagtcccgcaattatacatttaatacgcgatagaaaacaaaatatagcgcgcaaactaggataaattatcgcgcgcggtgtcatctatgttactagatcgggaattg

SEQ ID NO: 57 - DNA, 3611 bp, Artificial Sequence
  Synthetic construct, pAG4814
ataaaattttagtgaagctaaagcggtgaaagattatagaatttgatgtgccagattaataaatcgattaactcctaaagttcaagccgagactacagacacatgagctacataaatgagccaaggactcgagcaaagacaaatcgacacagacattataattcaagtcattctagaagattcatgagaagagtatcatttatttaaatcaatgacttgatcaaataagacctaggagctactattgataatatatatcatgggtatctagatcaagcattatgaagaagagcctaagtagaaggccccatgggctcgaccacaaacccaaggactcgacaataaagtctaggagggatcccatagctaaaaggactctagaagtgtatgtatggtaaagattttatcgagacaagaaatacgataaagatcttaacagaatcggagtcatacttgtaaaaatagagttggactcgtgtacaacttggtcttcgacttagttcggtcatgaattcagtaaccgactagatatgtaccatggaacccctagggcatgaggctatgagccataggatcatcagatccaaacatacaccaacaaatccatcacacaccgaagatccatattaacaagggattagctactttacaatttcagagtaacaaatagagccaaactcatagcacaggggaacttcatatcacaaatggaggcattgaattgatataaaaagctaaagttctaaaaagtttgaagtgctgaaacttcaaagccgctaactagtgaagcaccgaagccttccggggagagaagacatacacgacacgttagggacgtaaaatgacgaaattatacaactacctctatatgtaacacttatgtaatagaaaagacagaatccatatgaagatgtataatggatcaaccatataaatagataaacaatatatctgctatggggattggcattcttgtatccctacgcctgtatatcccctgtttagagaacctccgaaggtatatgatgctgaagattattgttgtcttgtctttcatcatatatcgagtctttccctaggatattattattcgcaatgtgcattacatggttaatcgattgagagaacatgcatctcacctttagctgataaacgataatccatgttttacacttcgtagctactcatgagtttcgatatacaaatttgttttctggactacgtaccattccatcctcttaggagaggagaggaagtgtcctcgatttaattatgttgtcattttgtagttcttcacaaaatctcaacaggtaccaaacacattgtttccacaagacatattttagtcacaacaaatctatattattattaatcactaaaactatactgaggctcagatgcttttactagctcttgctagtatgtgatgtaggtctctttcgacatcattccatcaaaatcatatgattagcccataccaaacatttctataccattcagagaccagaatagtcttttctaatagaaaaaaggaaaatagagtgggccgacgacgacacaaattactgcgtggaccagaaaatagtgagacacggaagacaaaagaagtaaaagaggcaaggactacggcccacatgagattcggccccgccacctccggcaaccagcggccgatccaacggcagtgcatcctcaacggcgcgcgcgcgcgcgcgcgcgcacaacctcgtatatatcgccgcgcggaagcggcgcgaccgaggaagccttgtcctcgacaccccctacacaggtgtcgcgctgcccccgacacgagtcccgcatgcgtcccacgcggccgcgccagatcccgcctccgcgcgttgccacgccctctataaacacccagctctctccctcgccctcatctatcgcactcgtagtcgtagctcaagcatcagcggcaggagctctgggcagcgtgcgcacgtggggtacctagctcgctctgctagcctaccggatcctaaaccatgcgcgtgctgctcgtggccctggccctgctggctcttgctgccagcgccacctctgcccagagcgagccggagctgaagctggagagcgtggtgatcgtgagcaggcacggcgtgagggccccgaccaaggccacccagctgatgcaggacgtgaccccggacgcgttctacacctggccggtgaagctgggcgagctgaccccgaggggcggcgagctgatcgcctacctgggccactactggaggcagaggctggtggccgacggcctgctgccgaagaagggctgcccgcagagcggccaggtggccatcatcgccgacgtggacgagaggaccaggaagaccggcgaggccttcgccgccggcctggccccggactgcgccatcaccgtgcacacccaggccgacaccagcagcccggacccgctgttcaacccgctgaagaccggcgtgtgccagctggacaacgcccaggtgaccgacgccatcctggagagggccggcggcagcatcgccgacttcaccggccactaccagaccgccttcagggagctggagagggtgctgaacttcccgcagagcaacctgtgcctgaagagggagaagcaggacgagagctgcagcctgacccaggccctgccgagcgagctgaaggtgagcgccgacaacgtgagcctgaccggcgccgtgagcctggccagcatgctgaccgagattttcctgctgcagcaggcccagggcatgccggagccgggctggggcaggatcaccgacagccaccagtggaacaccctgctgagcctgcacaacgcccagttcgacctgctgcagaggaccccggaggtggccaggagcagggccaccccgctgctggacctgatcaagaccgccctgaccccgcacccgccgcagaagcaggcctacggcgtgaccctgccgaccagcgtgctgttcatcgccggccacgacaccaacctggccaacctgggcggcgccctcgagctgcagtggaccctgccgggccagccggacaacaccccgccgggcggcgagctggtgttcgagaggtggaggaggctgagcgacaacagccagtggattcaggtgagcctggtgttccagaccctgcagcagatgagggacaagaccccgctgtccctgaacaccccgccgggcgaggtgaagctgaccctggccggctgcgaggagaggaacgcccagggcatgtgcagcctggccggcttcacccagatcgtgaacgaggccaggattccggcctgcagcctggacgagctgaaggccgaggccaagtgacctaggtccccgaatttccccgatcgttcaaacatttggcaataaagtttcttaagattgaatcctgttgccggtcttgcgatgattatcatataatttctgttgaattacgttaagcatgtaataattaacatgtaatgcatgacgttatttatgagatgggtttttatgattagagtcccgcaattatacatttaatacgcgatagaaaacaaaatatagcgcgcaaactaggataaattatcgcgcgcggtgtcatctatgttactagatcgggaattg

SEQ ID NO: 58 - DNA, 3605 bp, Artificial Sequence
  Synthetic construct, pAG4718
ataaaattttagtgaagctaaagcggtgaaagattatagaatttgatgtgccagattaataaatcgattaactcctaaagttcaagccgagactacagacacatgagctacataaatgagccaaggactcgagcaaagacaaatcgacacagacattataattcaagtcattctagaagattcatgagaagagtatcatttatttaaatcaatgacttgatcaaataagacctaggagctactattgataatatatatcatgggtatctagatcaagcattatgaagaagagcctaagtagaaggccccatgggctcgaccacaaacccaaggactcgacaataaagtctaggagggatcccatagctaaaaggactctagaagtgtatgtatggtaaagattttatcgagacaagaaatacgataaagatcttaacagaatcggagtcatacttgtaaaaatagagttggactcgtgtacaacttggtcttcgacttagttcggtcatgaattcagtaaccgactagatatgtaccatggaacccctagggcatgaggctatgagccataggatcatcagatccaaacatacaccaacaaatccatcacacaccgaagatccatattaacaagggattagctactttacaatttcagagtaacaaatagagccaaactcatagcacaggggaacttcatatcacaaatggaggcattgaattgatataaaaagctaaagttctaaaaagtttgaagtgctgaaacttcaaagccgctaactagtgaagcaccgaagccttccggggagagaagacatacacgacacgttagggacgtaaaatgacgaaattatacaactacctctatatgtaacacttatgtaatagaaaagacagaatccatatgaagatgtataatggatcaaccatataaatagataaacaatatatctgctatggggattggcattcttgtatccctacgcctgtatatcccctgtttagagaacctccgaaggtatatgatgctgaagattattgttgtcttgtctttcatcatatatcgagtctttccctaggatattattattcgcaatgtgcattacatggttaatcgattgagagaacatgcatctcacctttagctgataaacgataatccatgttttacacttcgtagctactcatgagtttcgatatacaaatttgttttctggactacgtaccattccatcctcttaggagaggagaggaagtgtcctcgatttaattatgttgtcattttgtagttcttcacaaaatctcaacaggtaccaaacacattgtttccacaagacatattttagtcacaacaaatctatattattattaatcactaaaactatactgaggctcagatgcttttactagctcttgctagtatgtgatgtaggtctctttcgacatcattccatcaaaatcatatgattagcccataccaaacatttctataccattcagagaccagaatagtcttttctaatagaaaaaaggaaaatagagtgggccgacgacgacacaaattactgcgtggaccagaaaatagtgagacacggaagacaaaagaagtaaaagaggcaaggactacggcccacatgagattcggccccgccacctccggcaaccagcggccgatccaacggcagtgcatcctcaacggcgcgcgcgcgcgcgcgcgcgcacaacctcgtatatatcgccgcgcggaagcggcgcgaccgaggaagccttgtcctcgacaccccctacacaggtgtcgcgctgcccccgacacgagtcccgcatgcgtcccacgcggccgcgccagatcccgcctccgcgcgttgccacgccctctataaacacccagctctctccctcgccctcatctatcgcactcgtagtcgtagctcaagcatcagcggcaggagctctgggcagcgtgcgcacgtggggtacctagctcgctctgctagcctaccggatccaccatgagggtgttgctcgttgccctcgctctcctggctctcgctgcgagcgccaccagcgctgcgcagtccgagccggagctgaagctggagtccgtggtgatcgtgtcgcgccacggggtgcgcgccccgaccaaggccacgcagctcatgcaggacgtgaccccggacgcctggccgacctggccggtgaagctcggcgagctgaccccgcgcggcggcgagctgatcgcctacctcggccactactggcgccagcgcctcgtggccgacggcctcctcccgaagtgcggctgcccgcagtccggccaggtggcgatcatcgccgacgtggacgagcgcacccgcaagacgggcgaggccttcgccgccggcctcgccccggactgcgccatcaccgtgcacacccaggccgacacctcctccccggacccgctcttcaacccgctcaagaccggcgtgtgccagctcgacaacgccaacgtgaccgacgccatcctggagcgcgccggcggctccatcgccgacttcaccggccactaccagaccgccttccgcgagctggagcgcgtgctcaacttcccgcagtcgaacctctgcctcaagcgcgagaagcaggacgagtcctgctccctcacccaggccctcccgtccgagctgaaggtgtccgccgactgcgtgtccctcaccggcgccgtgtccctcgcctccatgctcaccgaaatcttcctcctccagcaggcccagggcatgccggagccgggctggggccgcatcaccgactcccaccagtggaacaccctcctctccctccacaacgcccagttcgacctcctccagcgcaccccggaggtggcccgctcccgcgccaccccgctcctcgacctcatcaagaccgccctcaccccgcacccgccgcagaagcaggcctacggcgtgaccctcccgacctcggtgctcttcatcgccggccacgacaccaacctcgccaacctcggcggcgccctggagctgaactggaccctcccgggccagccggacaacaccccgccgggcggcgagctggtgttcgagcgctggcgccgcctctccgacaactcccagtggattcaggtgtccctcgtgttccagaccctccagcagatgcgcgacaagaccccgctctccctcaacaccccgccgggcgaggtgaagctcaccctggccggctgcgaggagcgcaacgcgcagggcatgtgctccctcgccggcttcacccagatcgtgaacgaggcccgcatcccggcctgctccctctccgagaaggacgagctgtaacctaggtccccgaatttccccgatcgttcaaacatttggcaataaagtttcttaagattgaatcctgttgccggtcttgcgatgattatcatataatttctgttgaattacgttaagcatgtaataattaacatgtaatgcatgacgttatttatgagatgggtttttatgattagagtcccgcaattatacatttaatacgcgatagaaaacaaaatatagcgcgcaaactaggataaattatcgcgcgcggtgtcatctatgttactagatcgggaattg

SEQ ID NO: 59 - DNA, 2968 bp, Artificial Sequence
  Synthetic construct, pAG4263
aaagtaatcatattattttatgtgtgaatcttctttactttttcatttgattatgattatgaaggtatgaccttcataaccttcgtccgaaatccattatatccaaaggaaaataatgcttcgaaggacgaaggattttgatatttaacattttatgttgccttgttcttaattcatagcatttgagaacaagtccccaacaccaatctttatctttactatattaaagcaccagttcaacgatcgtctcgtgtcaatattattaaaaaactcctacatttctttataatcaacccgcactcttataatctcttctcttactactataataagagagtttatgtacaaaataaggtgaaattatgtataagtgttctggaccttggttgttggctcatattcacacaacctaatcaatagaaaacatatgttttattaaaacaaaatttatcatatatatatatatatatatatatatatatatatatatatataatataaaccgtagcaatgcacaggcatatgactagtggcaacttaataccatgtgtgtattaagatgaataagaggtatccaaataaataacttgttcgcttacgtctggatcgaaaggggttggaaacgattaaatctcttcctagtcaaaattaaatagaaggagatttaatcgatttctcccaatccccttcgatccaggtgcaaccgaataagtccttaaatgttgaggaacacgaaacaaccatgcattggcatgtaaagctccaagaattcgttgtatccttaacaactcacagaacatcaaccaaaattgcacgtcaagggtattgggtaagaaacaatcaaacaaatcctctctgtgtgcaaagaaacacggtgagtcatgccgagatcatactcatctgatatacatgcttacagctcacaagacattacaaacaactcatattgcattacaaagatcgtttcatgaaaaataaaataggccggaacaggacaaaaatccttgacgtgtaaagtaaatttacaacaaaaaaaaagccatatgtcaagctaaatctaattcgttttacgtagatcaacaacctgtagaaggcaacaaaactgagccacgcagaagtacagaatgattccagatgaaccatcgacgtgctacgtaaagagagtgacgagtcatatacatttggcaagaaaccatgaagctgcctacagccgtctcggtggcataagaacacaagaaattgtgttaattaatcaaagctataaataacgctcgcatgcctgtgcacttctccatcaccaccactgggtcttcagaccattagctttatctactccagagcgcagaagaacccgatcgacaccggatcctaaaccatgcgcgtgctgctcgtggccctggccctgctggctcttgctgccagcgccacctctgcccagagcgagccggagctgaagctggagagcgtggtgatcgtgagcaggcacggcgtgagggccccgaccaagttcacccagctgatgcaggacgtgaccccggacgcgttctacacctggccggtgaagctgggcgagctgaccccgaggggcggcgagctgatcgcctacctgggccactactggaggcagaggctggtggccgacggcctgctgccgaagaagggctgcccgcagagcggccaggtggccatcatcgccgacgtggacgagaggaccaggaagaccggtgaggccttcgccgccggcctggccccggactgcgccatcaccgtgcacacccaggccgacaccagcagcccggacccgctgttcaacccgctgaagaccggcgtgtgccagctggacgtggcccaggtgaccgacgccatcctggagagggccggcggcagcatcgccgacttcaccggccactaccagaccgccttcagggagctggagagggtgctgaacttcccgcagagcaacctggccctgaagagggagaagcaggacgagagcgccagcctgacccaggccctgccgagcgagctgaaggtgagcgccgacaacgtgagcctgaccggcgcctggagcctggccagcatgctgaccgagattttcctgctgcagcaggcccagggcatgccggagccgggctggggcaggatcaccgacagccaccagtggaacaccctgctgagcctgcacaacgcccagttcgacctgctgcagaggaccccggaggtggccaggagcagggccaccccgctgctggacctgatcaagaccgccctgaccccgcacccgccgcagaagcaggcctacggcgtgaccctgccgaccagcgtgctgttcatcgccggccacgacaccaacctggccaacctgggcggcgccctcgagctgcagtggaccctgccgggccagccggacaacaccccgccgggcggcgagctggtgttcgagaggtggaggaggctgagcgacaacagccagtggattcaggtgagcctggtgttccagaccctgcagcagatgagggacaagaccccgctgttcctgaacaccccgccgggcgaggtgaagctgaccctggccggctgcgaggagaggaacgcccagggcatgtgcagcctggccggcttcacccagatcgtgaacgaggccaggattccggcctgcagcctgagcgagaaggacgagctgtgacctaggtccccgaatttccccgatcgttcaaacatttggcaataaagtttcttaagattgaatcctgttgccggtcttgcgatgattatcatataatttctgttgaattacgttaagcatgtaataattaacatgtaatgcatgacgttatttatgagatgggtttttatgattagagtcccgcaattatacatttaatacgcgatagaaaacaaaatatagcgcgcaaactaggataaattatcgcgcgcggtgtcatctatgttactagatcgggaattg

SEQ ID NO: 60 - DNA, 7262 bp, Artificial Sequence
  Synthetic construct, pAG4915
tccatgctgtcctactacttgcttcatccccttctacattttgttctggtttttggcctgcatttcggatcatgatgtatgtgatttccaatctgctgcaatatgaatggagactctgtgctaaccatcaacaacatgaaatgcttatgaggcctttgctgagcagccaatcttgcctgtgtttatgtcttcacaggccgaattcctctgttttgtttttcaccctcaatatttggaaacatttatctaggttgtttgtgtccaggcctataaatcatacatgatgttgtcgtattggatgtgaatgtggtggcgtgttcagtgccttggatttgagtttgatgagagttgcttctgggtcaccactcaccattatcgatgctcctcttcagcataaggtaaaagtcttccctgtttacgttattttacccactatggttgcttgggttggttttttcctgattgcttatgccatggaaagtcatttgatatgttgaacttgaattaactgtagaattgtatacatgttccatttgtgttgtacttccttcttttctattagtagcctcagatgagtgtgaaaaaaacagattatataacttgccctataaatcatttgaaaaaaatattgtacagtgagaaattgatatatagtgaatttttaagagcatgttttcctaaagaagtatatattttctatgtacaaaggccattgaagtaattgtagatacaggataatgtagactttttggacttacactgctacctttaagtaacaatcatgagcaatagtgttgcaatgatatttaggctgcattcgtttactctcttgatttccatgagcacgcttcccaaactgttaaactctgtgttttttgccaaaaaaaaatgcataggaaagttgcttttaaaaaatcatatcaatccattttttaagttatagctaatacttaattaatcatgcgctaataagtcactctgtttttcgtactagagagattgttttgaaccagcactcaagaacacagccttaacccagccaaataatgctacaacctaccagtccacacctcttgtaaagcatttgttgcatggaaaagctaagatgacagcaacctgttcaggaaaacaactgacaaggtcatagggagagggagcttttggaaaggtgccgtgcagttcaaacaattagttagcagtagggtgttggtttttgctcacagcaataagaagttaatcatggtgtaggcaacccaaataaaacaccaaaatatgcacaaggcagtttgttgtattctgtagtacagacaaaactaaaagtaatgaaagaagatgtggtgttagaaaaggaaacaatatcatgagtaatgtgtgggcattatgggaccacgaaataaaaagaacattttgatgagtcgtgtatcctcgatgagcctcaaaagttctctcaccccggataagaaacccttaagcaatgtgcaaagtttgcattctccactgacataatgcaaaataagatatcatcgatgacatagcaactcatgcatcatatcatgcctctctcaacctattcattcctactcatctacataagtatcttcagctaaatgttagaacataaacccataagtcacgtttgatgagtattaggcgtgacacatgacaaatcacagactcaagcaagataaagcaaaatgatgtgtacataaaactccagagctatatgtcatattgcaaaaagaggagagcttataagacaaggcatgactcacaaaaattcatttgcctttcgtgtcaaaaagaggagggctttacattatccatgtcatattgcaaaagaaagagagaaagaacaacacaatgctgcgtcaattatacatatctgtatgtccatcattattcatccacctttcgtgtaccacacttcatatatcatgagtcacttcatgtctggacattaacaaactctatcttaacatttagatgcaagagcctttatctcactataaatgcacgatgatttctcattgtttctcacaaaaagcattcagttcattagtcctacaacaacggatccaccatgagggtgttgctcgttgccctcgctctcctggctctcgctgcgagcgccaccagcgctgcgcagtccgagccggagctgaagctggagtccgtggtgatcgtgtcgcgccacggggtgcgcgccccgaccaagttcacgcagctcatgcaggacgtgaccccggacgccttctacacctggccggtgaagctcggcgagctgaccccgcgcggcggcgagctgatcgcctacctcggccactactggcgccagcgcctcgtggccgacggcctcctcccgaagaagggctgcccgcagtccggccaggtggcgatcatcgccgacgtggacgagcgcacccgcaagacgggcgaggccttcgccgccggcctcgccccggactgcgccatcaccgtgcacacccaggccgacacctcctccccggacccgctcttcaacccgctcaagaccggcgtgtgccagctcgacgtggcccaggtgaccgacgccatcctggagcgcgccggcggctccatcgccgacttcaccggccactaccagaccgccttccgcgagctggagcgcgtgctcaacttcccgcagtcgaacctcgccctcaagcgcgagaagcaggacgagtccgcctccctcacccaggccctcccgtccgagctgaaggtgtccgccgacaacgtgtccctcaccggcgcctggtccctcgcctccatgctcaccgaaatcttcctcctccagcaggcccagggcatgccggagccgggctggggccgcatcaccgactcccaccagtggaacaccctcctctccctccacaacgcccagttcgacctcctccagcgcaccccggaggtggcccgctcccgcgccaccccgctcctcgacctcatcaagaccgccctcaccccgcacccgccgcagaagcaggcctacggcgtgaccctcccgacctcggtgctcttcatcgccggccacgacaccaacctcgccaacctcggcggcgccctggagctgcagtggaccctcccgggccagccggacaacaccccgccgggcggcgagctggtgttcgagcgctggcgccgcctctccgacaactcccagtggattcaggtgtccctcgtgttccagaccctccagcagatgcgcgacaagaccccgctcttcctcaacaccccgccgggcgaggtgaagctcaccctggccggctgcgaggagcgcaacgcgcagggcatgtgctccctcgccggcttcacccagatcgtgaacgaggcccgcatcccggcctgctccctctccgagaaggacgagctgtaacctaggtccccgaatttccccgatcgttcaaacatttggcaataaagtttcttaagattgaatcctgttgccggtcttgcgatgattatcatataatttctgttgaattacgttaagcatgtaataattaacatgtaatgcatgacgttatttatgagatgggtttttatgattagagtcccgcaattatacatttaatacgcgatagaaaacaaaatatagcgcgcaaactaggataaattatcgcgcgcggtgtcatctatgttactagatcgggaattgggtacctccatgctgtcctactacttgcttcatccccttctacattttgttctggtttttggcctgcatttcggatcatgatgtatgtgatttccaatctgctgcaatatgaatggagactctgtgctaaccatcaacaacatgaaatgcttatgaggcctttgctgagcagccaatcttgcctgtgtttatgtcttcacaggccgaattcctctgttttgtttttcaccctcaatatttggaaacatttatctaggttgtttgtgtccaggcctataaatcatacatgatgttgtcgtattggatgtgaatgtggtggcgtgttcagtgccttggatttgagtttgatgagagttgcttctgggtcaccactcaccattatcgatgctcctcttcagcataaggtaaaagtcttccctgtttacgttattttacccactatggttgcttgggttggttttttcctgattgcttatgccatggaaagtcatttgatatgttgaacttgaattaactgtagaattgtatacatgttccatttgtgttgtacttccttcttttctattagtagcctcagatgagtgtgaaaaaaacagattatataacttgccctataaatcatttgaaaaaaatattgtacagtgagaaattgatatatagtgaatttttaagagcatgttttcctaaagaagtatatattttctatgtacaaaggccattgaagtaattgtagatacaggataatgtagactttttggacttacactgctacctttaagtaacaatcatgagcaatagtgttgcaatgatatttaggctgcattcgtttactctcttgatttccatgagcacgcttcccaaactgttaaactctgtgttttttgccaaaaaaaaatgcataggaaagttgcttttaaaaaatcatatcaatccattttttaagttatagctaatacttaattaatcatgcgctaataagtcactctgtttttcgtactagagagattgttttgaaccagcactcaagaacacagccttaacccagccaaataatgctacaacctaccagtccacacctcttgtaaagcatttgttgcatggaaaagctaagatgacagcaacctgttcaggaaaacaactgacaaggtcatagggagagggagcttttggaaaggtgccgtgcagttcaaacaattagttagcagtagggtgttggtttttgctcacagcaataagaagttaatcatggtgtaggcaacccaaataaaacaccaaaatatgcacaaggcagtttgttgtattctgtagtacagacaaaactaaaagtaatgaaagaagatgtggtgttagaaaaggaaacaatatcatgagtaatgtgtgggcattatgggaccacgaaataaaaagaacattttgatgagtcgtgtatcctcgatgagcctcaaaagttctctcaccccggataagaaacccttaagcaatgtgcaaagtttgcattctccactgacataatgcaaaataagatatcatcgatgacatagcaactcatgcatcatatcatgcctctctcaacctattcattcctactcatctacataagtatcttcagctaaatgttagaacataaacccataagtcacgtttgatgagtattaggcgtgacacatgacaaatcacagactcaagcaagataaagcaaaatgatgtgtacataaaactccagagctatatgtcatattgcaaaaagaggagagcttataagacaaggcatgactcacaaaaattcatttgcctttcgtgtcaaaaagaggagggctttacattatccatgtcatattgcaaaagaaagagagaaagaacaacacaatgctgcgtcaattatacatatctgtatgtccatcattattcatccacctttcgtgtaccacacttcatatatcatgagtcacttcatgtctggacattaacaaactctatcttaacatttagatgcaagagcctttatctcactataaatgcacgatgatttctcattgtttctcacaaaaagcattcagttcattagtcctacaacaacggatccaccatgagggtgttgctcgttgccctcgctctcctggctctcgctgcgagcgccaccagcgctgcgcagtccgagccggagctgaagctggagtccgtggtgatcgtgtcgcgccacggggtgcgcgccccgaccaagttcacgcagctcatgcaggacgtgaccccggacgccttctacacctggccggtgaagctcggcgagctgaccccgcgcggcggcgagctgatcgcctacctcggccactactggcgccagcgcctcgtggccgacggcctcctcccgaagaagggctgcccgcagtccggccaggtggcgatcatcgccgacgtggacgagcgcacccgcaagacgggcgaggccttcgccgccggcctcgccccggactgcgccatcaccgtgcacacccaggccgacacctcctccccggacccgctcttcaacccgctcaagaccggcgtgtgccagctcgacgtggcccaggtgaccgacgccatcctggagcgcgccggcggctccatcgccgacttcaccggccactaccagaccgccttccgcgagctggagcgcgtgctcaacttcccgcagtcgaacctcgccctcaagcgcgagaagcaggacgagtccgcctccctcacccaggccctcccgtccgagctgaaggtgtccgccgacaacgtgtccctcaccggcgcctggtccctcgcctccatgctcaccgaaatcttcctcctccagcaggcccagggcatgccggagccgggctggggccgcatcaccgactcccaccagtggaacaccctcctctccctccacaacgcccagttcgacctcctccagcgcaccccggaggtggcccgctcccgcgccaccccgctcctcgacctcatcaagaccgccctcaccccgcacccgccgcagaagcaggcctacggcgtgaccctcccgacctcggtgctcttcatcgccggccacgacaccaacctcgccaacctcggcggcgccctggagctgcagtggaccctcccgggccagccggacaacaccccgccgggcggcgagctggtgttcgagcgctggcgccgcctctccgacaactcccagtggattcaggtgtccctcgtgttccagaccctccagcagatgcgcgacaagaccccgctcttcctcaacaccccgccgggcgaggtgaagctcaccctggccggctgcgaggagcgcaacgcgcagggcatgtgctccctcgccggcttcacccagatcgtgaacgaggcccgcatcccggcctgctccctctccgagaaggacgagctgtaacctaggctgcacaaagtggagtagtcagtcatcgatcaggaaccagacaccagacttttattcatacagtgaagtgaagtgaagtgcagtgcagtgagttgctggtttttgtacaacttagtatgtatttgtatttgtaaaatacttctatcaataaaatttctaattcctaaaaccaaaatccag

SEQ ID NO: 61 - DNA, 2974 bp, Artificial Sequence
  Synthetic construct, pAG4284
aaagtaatcatattattttatgtgtgaatcttctttactttttcatttgattatgattatgaaggtatgaccttcataaccttcgtccgaaatccattatatccaaaggaaaataatgcttcgaaggacgaaggattttgatatttaacattttatgttgccttgttcttaattcatagcatttgagaacaagtccccaacaccaatctttatctttactatattaaagcaccagttcaacgatcgtctcgtgtcaatattattaaaaaactcctacatttctttataatcaacccgcactcttataatctcttctcttactactataataagagagtttatgtacaaaataaggtgaaattatgtataagtgttctggaccttggttgttggctcatattcacacaacctaatcaatagaaaacatatgttttattaaaacaaaatttatcatatatatatatatatatatatatatatatatatatatatataatataaaccgtagcaatgcacaggcatatgactagtggcaacttaataccatgtgtgtattaagatgaataagaggtatccaaataaataacttgttcgcttacgtctggatcgaaaggggttggaaacgattaaatctcttcctagtcaaaattaaatagaaggagatttaatcgatttctcccaatccccttcgatccaggtgcaaccgaataagtccttaaatgttgaggaacacgaaacaaccatgcattggcatgtaaagctccaagaattcgttgtatccttaacaactcacagaacatcaaccaaaattgcacgtcaagggtattgggtaagaaacaatcaaacaaatcctctctgtgtgcaaagaaacacggtgagtcatgccgagatcatactcatctgatatacatgcttacagctcacaagacattacaaacaactcatattgcattacaaagatcgtttcatgaaaaataaaataggccggaacaggacaaaaatccttgacgtgtaaagtaaatttacaacaaaaaaaaagccatatgtcaagctaaatctaattcgttttacgtagatcaacaacctgtagaaggcaacaaaactgagccacgcagaagtacagaatgattccagatgaaccatcgacgtgctacgtaaagagagtgacgagtcatatacatttggcaagaaaccatgaagctgcctacagccgtctcggtggcataagaacacaagaaattgtgttaattaatcaaagctataaataacgctcgcatgcctgtgcacttctccatcaccaccactgggtcttcagaccattagctttatctactccagagcgcagaagaacccgatcgacaccggatcctaaaccatgcgcgtgctgctcgtggccctggccctgctggctcttgctgccagcgccacctctgcccagagcgagccggagctgaagctggagagcgtggtgatcgtgagcaggcacggcgtgagggccccgaccaagttcacccagctgatgcaggacgtgaccccggacgcgttctacacctggccggtgaagctgggcgagctgaccccgaggggcggcgagctgatcgcctacctgggccactactggaggcagaggctggtggccgacggcctgctgccgaagaagggctgcccgcagagcggccaggtggccatcatcgccgacgtggacgagaggaccaggaagaccggtgaggccttcgccgccggcctggccccggactgcgccatcaccgtgcacacccaggccgacaccagcagcccggacccgctgttcaacccgctgaagaccggcgtgtgccagctggacgtggcccaggtgaccgacgccatcctggagagggccggcggcagcatcgccgacttcaccggccactaccagaccgccttcagggagctggagagggtgctgaacttcccgcagagcaacctggccctgaagagggagaagcaggacgagagcgccagcctgacccaggccctgccgagcgagctgaaggtgagcgccgacaacgtgagcctgaccggcgcctggagcctggccagcatgctgaccgagattttcctgctgcagcaggcccagggcatgccggagccgggctggggcaggatcaccgacagccaccagtggaacaccctgctgagcctgcacaacgcccagttcgacctgctgcagaggaccccggaggtggccaggagcagggccaccccgctgctggacctgatcaagaccgccctgaccccgcacccgccgcagaagcaggcctacggcgtgaccctgccgaccagcgtgctgttcatcgccggccacgacaccaacctggccaacctgggcggcgccctcgagctgcagtggaccctgccgggccagccggacaacaccccgccgggcggcgagctggtgttcgagaggtggaggaggctgagcgacaacagccagtggattcaggtgagcctggtgttccagaccctgcagcagatgagggacaagaccccgctgttcctgaacaccccgccgggcgaggtgaagctgaccctggccggctgcgaggagaggaacgcccagggcatgtgcagcctggccggcttcacccagatcgtgaacgaggccaggattccggcctgcagcctggacgagctgaaggccgaggccaagtgacctaggtccccgaatttccccgatcgttcaaacatttggcaataaagtttcttaagattgaatcctgttgccggtcttgcgatgattatcatataatttctgttgaattacgttaagcatgtaataattaacatgtaatgcatgacgttatttatgagatgggtttttatgattagagtcccgcaattatacatttaatacgcgatagaaaacaaaatatagcgcgcaaactaggataaattatcgcgcgcggtgtcatctatgttactagatcgggaattg

SEQ ID NO: 62 - DNA, 2968 bp, Artificial Sequence
  Synthetic construct, pAG4913
aaagtaatcatattattttatgtgtgaatcttctttactttttcatttgattatgattatgaaggtatgaccttcataaccttcgtccgaaatccattatatccaaaggaaaataatgcttcgaaggacgaaggattttgatatttaacattttatgttgccttgttcttaattcatagcatttgagaacaagtccccaacaccaatctttatctttactatattaaagcaccagttcaacgatcgtctcgtgtcaatattattaaaaaactcctacatttctttataatcaacccgcactcttataatctcttctcttactactataataagagagtttatgtacaaaataaggtgaaattatgtataagtgttctggaccttggttgttggctcatattcacacaacctaatcaatagaaaacatatgttttattaaaacaaaatttatcatatatatatatatatatatatatatatatatatatatatataatataaaccgtagcaatgcacaggcatatgactagtggcaacttaataccatgtgtgtattaagatgaataagaggtatccaaataaataacttgttcgcttacgtctggatcgaaaggggttggaaacgattaaatctcttcctagtcaaaattaaatagaaggagatttaatcgatttctcccaatccccttcgatccaggtgcaaccgaataagtccttaaatgttgaggaacacgaaacaaccatgcattggcatgtaaagctccaagaattcgttgtatccttaacaactcacagaacatcaaccaaaattgcacgtcaagggtattgggtaagaaacaatcaaacaaatcctctctgtgtgcaaagaaacacggtgagtcatgccgagatcatactcatctgatatacatgcttacagctcacaagacattacaaacaactcatattgcattacaaagatcgtttcatgaaaaataaaataggccggaacaggacaaaaatccttgacgtgtaaagtaaatttacaacaaaaaaaaagccatatgtcaagctaaatctaattcgttttacgtagatcaacaacctgtagaaggcaacaaaactgagccacgcagaagtacagaatgattccagatgaaccatcgacgtgctacgtaaagagagtgacgagtcatatacatttggcaagaaaccatgaagctgcctacagccgtctcggtggcataagaacacaagaaattgtgttaattaatcaaagctataaataacgctcgcatgcctgtgcacttctccatcaccaccactgggtcttcagaccattagctttatctactccagagcgcagaagaacccgatcgacaccggatccaccatgagggtgttgctcgttgccctcgctctcctggctctcgctgcgagcgccaccagcgctgcgcagtccgagccggagctgaagctggagtccgtggtgatcgtgtcgcgccacggggtgcgcgccccgaccaagttcacgcagctcatgcaggacgtgaccccggacgccttctacacctggccggtgaagctcggcgagctgaccccgcgcggcggcgagctgatcgcctacctcggccactactggcgccagcgcctcgtggccgacggcctcctcccgaagaagggctgcccgcagtccggccaggtggcgatcatcgccgacgtggacgagcgcacccgcaagacgggcgaggccttcgccgccggcctcgccccggactgcgccatcaccgtgcacacccaggccgacacctcctccccggacccgctcttcaacccgctcaagaccggcgtgtgccagctcgacgtggcccaggtgaccgacgccatcctggagcgcgccggcggctccatcgccgacttcaccggccactaccagaccgccttccgcgagctggagcgcgtgctcaacttcccgcagtcgaacctcgccctcaagcgcgagaagcaggacgagtccgcctccctcacccaggccctcccgtccgagctgaaggtgtccgccgacaacgtgtccctcaccggcgcctggtccctcgcctccatgctcaccgaaatcttcctcctccagcaggcccagggcatgccggagccgggctggggccgcatcaccgactcccaccagtggaacaccctcctctccctccacaacgcccagttcgacctcctccagcgcaccccggaggtggcccgctcccgcgccaccccgctcctcgacctcatcaagaccgccctcaccccgcacccgccgcagaagcaggcctacggcgtgaccctcccgacctcggtgctcttcatcgccggccacgacaccaacctcgccaacctcggcggcgccctggagctgcagtggaccctcccgggccagccggacaacaccccgccgggcggcgagctggtgttcgagcgctggcgccgcctctccgacaactcccagtggattcaggtgtccctcgtgttccagaccctccagcagatgcgcgacaagaccccgctcttcctcaacaccccgccgggcgaggtgaagctcaccctggccggctgcgaggagcgcaacgcgcagggcatgtgctccctcgccggcttcacccagatcgtgaacgaggcccgcatcccggcctgctccctctccgagaaggacgagctgtaacctaggtccccgaatttccccgatcgttcaaacatttggcaataaagtttcttaagattgaatcctgttgccggtcttgcgatgattatcatataatttctgttgaattacgttaagcatgtaataattaacatgtaatgcatgacgttatttatgagatgggtttttatgattagagtcccgcaattatacatttaatacgcgatagaaaacaaaatatagcgcgcaaactaggataaattatcgcgcgcggtgtcatctatgttactagatcgggaattg

SEQ ID NO: 63 - DNA, 2968 bp, Artificial Sequence
  Synthetic construct, pAG4265
aaagtaatcatattattttatgtgtgaatcttctttactttttcatttgattatgattatgaaggtatgaccttcataaccttcgtccgaaatccattatatccaaaggaaaataatgcttcgaaggacgaaggattttgatatttaacattttatgttgccttgttcttaattcatagcatttgagaacaagtccccaacaccaatctttatctttactatattaaagcaccagttcaacgatcgtctcgtgtcaatattattaaaaaactcctacatttctttataatcaacccgcactcttataatctcttctcttactactataataagagagtttatgtacaaaataaggtgaaattatgtataagtgttctggaccttggttgttggctcatattcacacaacctaatcaatagaaaacatatgttttattaaaacaaaatttatcatatatatatatatatatatatatatatatatatatatatataatataaaccgtagcaatgcacaggcatatgactagtggcaacttaataccatgtgtgtattaagatgaataagaggtatccaaataaataacttgttcgcttacgtctggatcgaaaggggttggaaacgattaaatctcttcctagtcaaaattaaatagaaggagatttaatcgatttctcccaatccccttcgatccaggtgcaaccgaataagtccttaaatgttgaggaacacgaaacaaccatgcattggcatgtaaagctccaagaattcgttgtatccttaacaactcacagaacatcaaccaaaattgcacgtcaagggtattgggtaagaaacaatcaaacaaatcctctctgtgtgcaaagaaacacggtgagtcatgccgagatcatactcatctgatatacatgcttacagctcacaagacattacaaacaactcatattgcattacaaagatcgtttcatgaaaaataaaataggccggaacaggacaaaaatccttgacgtgtaaagtaaatttacaacaaaaaaaaagccatatgtcaagctaaatctaattcgttttacgtagatcaacaacctgtagaaggcaacaaaactgagccacgcagaagtacagaatgattccagatgaaccatcgacgtgctacgtaaagagagtgacgagtcatatacatttggcaagaaaccatgaagctgcctacagccgtctcggtggcataagaacacaagaaattgtgttaattaatcaaagctataaataacgctcgcatgcctgtgcacttctccatcaccaccactgggtcttcagaccattagctttatctactccagagcgcagaagaacccgatcgacaccggatcctaaaccatgcgcgtgctgctcgtggccctggccctgctggctcttgctgccagcgccacctctgcccagagcgagccggagctgaagctggagagcgtggtgatcgtgagcaggcacggcgtgagggccccgaccaaggccacccagctgatgcaggacgtgaccccggacgcgttctacacctggccggtgaagctgggcgagctgaccccgaggggcggcgagctgatcgcctacctgggccactactggaggcagaggctggtggccgacggcctgctgccgaagaagggctgcccgcagagcggccaggtggccatcatcgccgacgtggacgagaggaccaggaagaccggcgaggccttcgccgccggcctggccccggactgcgccatcaccgtgcacacccaggccgacaccagcagcccggacccgctgttcaacccgctgaagaccggcgtgtgccagctggacaacgcccaggtgaccgacgccatcctggagagggccggcggcagcatcgccgacttcaccggccactaccagaccgccttcagggagctggagagggtgctgaacttcccgcagagcaacctgtgcctgaagagggagaagcaggacgagagctgcagcctgacccaggccctgccgagcgagctgaaggtgagcgccgacaacgtgagcctgaccggcgccgtgagcctggccagcatgctgaccgagattttcctgctgcagcaggcccagggcatgccggagccgggctggggcaggatcaccgacagccaccagtggaacaccctgctgagcctgcacaacgcccagttcgacctgctgcagaggaccccggaggtggccaggagcagggccaccccgctgctggacctgatcaagaccgccctgaccccgcacccgccgcagaagcaggcctacggcgtgaccctgccgaccagcgtgctgttcatcgccggccacgacaccaacctggccaacctgggcggcgccctcgagctgcagtggaccctgccgggccagccggacaacaccccgccgggcggcgagctggtgttcgagaggtggaggaggctgagcgacaacagccagtggattcaggtgagcctggtgttccagaccctgcagcagatgagggacaagaccccgctgtccctgaacaccccgccgggcgaggtgaagctgaccctggccggctgcgaggagaggaacgcccagggcatgtgcagcctggccggcttcacccagatcgtgaacgaggccaggattccggcctgcagcctgagcgagaaggacgagctgtgacctaggtccccgaatttccccgatcgttcaaacatttggcaataaagtttcttaagattgaatcctgttgccggtcttgcgatgattatcatataatttctgttgaattacgttaagcatgtaataattaacatgtaatgcatgacgttatttatgagatgggtttttatgattagagtcccgcaattatacatttaatacgcgatagaaaacaaaatatagcgcgcaaactaggataaattatcgcgcgcggtgtcatctatgttactagatcgggaattg

SEQ ID NO: 64 - DNA, 6650 bp, Artificial Sequence
  Synthetic construct, pAG4916
tccatgctgtcctactacttgcttcatccccttctacattttgttctggtttttggcctgcatttcggatcatgatgtatgtgatttccaatctgctgcaatatgaatggagactctgtgctaaccatcaacaacatgaaatgcttatgaggcctttgctgagcagccaatcttgcctgtgtttatgtcttcacaggccgaattcctctgttttgtttttcaccctcaatatttggaaacatttatctaggttgtttgtgtccaggcctataaatcatacatgatgttgtcgtattggatgtgaatgtggtggcgtgttcagtgccttggatttgagtttgatgagagttgcttctgggtcaccactcaccattatcgatgctcctcttcagcataaggtaaaagtcttccctgtttacgttattttacccactatggttgcttgggttggttttttcctgattgcttatgccatggaaagtcatttgatatgttgaacttgaattaactgtagaattgtatacatgttccatttgtgttgtacttccttcttttctattagtagcctcagatgagtgtgaaaaaaacagattatataacttgccctataaatcatttgaaaaaaatattgtacagtgagaaattgatatatagtgaatttttaagagcatgttttcctaaagaagtatatattttctatgtacaaaggccattgaagtaattgtagatacaggataatgtagactttttggacttacactgctacctttaagtaacaatcatgagcaatagtgttgcaatgatatttaggctgcattcgtttactctcttgatttccatgagcacgcttcccaaactgttaaactctgtgttttttgccaaaaaaaaatgcataggaaagttgcttttaaaaaatcatatcaatccattttttaagttatagctaatacttaattaatcatgcgctaataagtcactctgtttttcgtactagagagattgttttgaaccagcactcaagaacacagccttaacccagccaaataatgctacaacctaccagtccacacctcttgtaaagcatttgttgcatggaaaagctaagatgacagcaacctgttcaggaaaacaactgacaaggtcatagggagagggagcttttggaaaggtgccgtgcagttcaaacaattagttagcagtagggtgttggtttttgctcacagcaataagaagttaatcatggtgtaggcaacccaaataaaacaccaaaatatgcacaaggcagtttgttgtattctgtagtacagacaaaactaaaagtaatgaaagaagatgtggtgttagaaaaggaaacaatatcatgagtaatgtgtgggcattatgggaccacgaaataaaaagaacattttgatgagtcgtgtatcctcgatgagcctcaaaagttctctcaccccggataagaaacccttaagcaatgtgcaaagtttgcattctccactgacataatgcaaaataagatatcatcgatgacatagcaactcatgcatcatatcatgcctctctcaacctattcattcctactcatctacataagtatcttcagctaaatgttagaacataaacccataagtcacgtttgatgagtattaggcgtgacacatgacaaatcacagactcaagcaagataaagcaaaatgatgtgtacataaaactccagagctatatgtcatattgcaaaaagaggagagcttataagacaaggcatgactcacaaaaattcatttgcctttcgtgtcaaaaagaggagggctttacattatccatgtcatattgcaaaagaaagagagaaagaacaacacaatgctgcgtcaattatacatatctgtatgtccatcattattcatccacctttcgtgtaccacacttcatatatcatgagtcacttcatgtctggacattaacaaactctatcttaacatttagatgcaagagcctttatctcactataaatgcacgatgatttctcattgtttctcacaaaaagcattcagttcattagtcctacaacaacggatccaccatgagggtgttgctcgttgccctcgctctcctggctctcgctgcgagcgccaccagcgctgcgcagtccgagccggagctgaagctggagtccgtggtgatcgtgtcgcgccacggggtgcgcgccccgaccaagttcacgcagctcatgcaggacgtgaccccggacgccttctacacctggccggtgaagctcggcgagctgaccccgcgcggcggcgagctgatcgcctacctcggccactactggcgccagcgcctcgtggccgacggcctcctcccgaagaagggctgcccgcagtccggccaggtggcgatcatcgccgacgtggacgagcgcacccgcaagacgggcgaggccttcgccgccggcctcgccccggactgcgccatcaccgtgcacacccaggccgacacctcctccccggacccgctcttcaacccgctcaagaccggcgtgtgccagctcgacgtggcccaggtgaccgacgccatcctggagcgcgccggcggctccatcgccgacttcaccggccactaccagaccgccttccgcgagctggagcgcgtgctcaacttcccgcagtcgaacctcgccctcaagcgcgagaagcaggacgagtccgcctccctcacccaggccctcccgtccgagctgaaggtgtccgccgacaacgtgtccctcaccggcgcctggtccctcgcctccatgctcaccgaaatcttcctcctccagcaggcccagggcatgccggagccgggctggggccgcatcaccgactcccaccagtggaacaccctcctctccctccacaacgcccagttcgacctcctccagcgcaccccggaggtggcccgctcccgcgccaccccgctcctcgacctcatcaagaccgccctcaccccgcacccgccgcagaagcaggcctacggcgtgaccctcccgacctcggtgctcttcatcgccggccacgacaccaacctcgccaacctcggcggcgccctggagctgcagtggaccctcccgggccagccggacaacaccccgccgggcggcgagctggtgttcgagcgctggcgccgcctctccgacaactcccagtggattcaggtgtccctcgtgttccagaccctccagcagatgcgcgacaagaccccgctcttcctcaacaccccgccgggcgaggtgaagctcaccctggccggctgcgaggagcgcaacgcgcagggcatgtgctccctcgccggcttcacccagatcgtgaacgaggcccgcatcccggcctgctccctctccgagaaggacgagctgtaacctaggtccccgaatttccccgatcgttcaaacatttggcaataaagtttcttaagattgaatcctgttgccggtcttgcgatgattatcatataatttctgttgaattacgttaagcatgtaataattaacatgtaatgcatgacgttatttatgagatgggtttttatgattagagtcccgcaattatacatttaatacgcgatagaaaacaaaatatagcgcgcaaactaggataaattatcgcgcgcggtgtcatctatgttactagatcgggaattgggtaccaaagtaatcatattattttatgtgtgaatcttctttactttttcatttgattatgattatgaaggtatgaccttcataaccttcgtccgaaatccattatatccaaaggaaaataatgcttcgaaggacgaaggattttgatatttaacattttatgttgccttgttcttaattcatagcatttgagaacaagtccccaacaccaatctttatctttactatattaaagcaccagttcaacgatcgtctcgtgtcaatattattaaaaaactcctacatttctttataatcaacccgcactcttataatctcttctcttactactataataagagagtttatgtacaaaataaggtgaaattatgtataagtgttctggaccttggttgttggctcatattcacacaacctaatcaatagaaaacatatgttttattaaaacaaaatttatcatatatatatatatatatatatatatatatatatatatatataatataaaccgtagcaatgcacaggcatatgactagtggcaacttaataccatgtgtgtattaagatgaataagaggtatccaaataaataacttgttcgcttacgtctggatcgaaaggggttggaaacgattaaatctcttcctagtcaaaattaaatagaaggagatttaatcgatttctcccaatccccttcgatccaggtgcaaccgaataagtccttaaatgttgaggaacacgaaacaaccatgcattggcatgtaaagctccaagaattcgttgtatccttaacaactcacagaacatcaaccaaaattgcacgtcaagggtattgggtaagaaacaatcaaacaaatcctctctgtgtgcaaagaaacacggtgagtcatgccgagatcatactcatctgatatacatgcttacagctcacaagacattacaaacaactcatattgcattacaaagatcgtttcatgaaaaataaaataggccggaacaggacaaaaatccttgacgtgtaaagtaaatttacaacaaaaaaaaagccatatgtcaagctaaatctaattcgttttacgtagatcaacaacctgtagaaggcaacaaaactgagccacgcagaagtacagaatgattccagatgaaccatcgacgtgctacgtaaagagagtgacgagtcatatacatttggcaagaaaccatgaagctgcctacagccgtctcggtggcataagaacacaagaaattgtgttaattaatcaaagctataaataacgctcgcatgcctgtgcacttctccatcaccaccactgggtcttcagaccattagctttatctactccagagcgcagaagaacccgatcgacaccggatccaccatgagggtgttgctcgttgccctcgctctcctggctctcgctgcgagcgccaccagcgctgcgcagtccgagccggagctgaagctggagtccgtggtgatcgtgtcgcgccacggggtgcgcgccccgaccaagttcacgcagctcatgcaggacgtgaccccggacgccttctacacctggccggtgaagctcggcgagctgaccccgcgcggcggcgagctgatcgcctacctcggccactactggcgccagcgcctcgtggccgacggcctcctcccgaagaagggctgcccgcagtccggccaggtggcgatcatcgccgacgtggacgagcgcacccgcaagacgggcgaggccttcgccgccggcctcgccccggactgcgccatcaccgtgcacacccaggccgacacctcctccccggacccgctcttcaacccgctcaagaccggcgtgtgccagctcgacgtggcccaggtgaccgacgccatcctggagcgcgccggcggctccatcgccgacttcaccggccactaccagaccgccttccgcgagctggagcgcgtgctcaacttcccgcagtcgaacctcgccctcaagcgcgagaagcaggacgagtccgcctccctcacccaggccctcccgtccgagctgaaggtgtccgccgacaacgtgtccctcaccggcgcctggtccctcgcctccatgctcaccgaaatcttcctcctccagcaggcccagggcatgccggagccgggctggggccgcatcaccgactcccaccagtggaacaccctcctctccctccacaacgcccagttcgacctcctccagcgcaccccggaggtggcccgctcccgcgccaccccgctcctcgacctcatcaagaccgccctcaccccgcacccgccgcagaagcaggcctacggcgtgaccctcccgacctcggtgctcttcatcgccggccacgacaccaacctcgccaacctcggcggcgccctggagctgcagtggaccctcccgggccagccggacaacaccccgccgggcggcgagctggtgttcgagcgctggcgccgcctctccgacaactcccagtggattcaggtgtccctcgtgttccagaccctccagcagatgcgcgacaagaccccgctcttcctcaacaccccgccgggcgaggtgaagctcaccctggccggctgcgaggagcgcaacgcgcagggcatgtgctccctcgccggcttcacccagatcgtgaacgaggcccgcatcccggcctgctccctctccgagaaggacgagctgtaacctaggtccccgaatttccccgatcgttcaaacatttggcaataaagtttcttaagattgaatcctgttgccggtcttgcgatgattatcatataatttctgttgaattacgttaagcatgtaataattaacatgtaatgcatgacgttatttatgagatgggtttttatgattagagtcccgcaattatacatttaatacgcgatagaaaacaaaatatagcgcgcaaactaggataaattatcgcgcgcggtgtcatctatgttactagatcgggaattg

SEQ ID NO: 65 - DNA, 2974 bp, Artificial Sequence
  Synthetic construct, pAG4285
aaagtaatcatattattttatgtgtgaatcttctttactttttcatttgattatgattatgaaggtatgaccttcataaccttcgtccgaaatccattatatccaaaggaaaataatgcttcgaaggacgaaggattttgatatttaacattttatgttgccttgttcttaattcatagcatttgagaacaagtccccaacaccaatctttatctttactatattaaagcaccagttcaacgatcgtctcgtgtcaatattattaaaaaactcctacatttctttataatcaacccgcactcttataatctcttctcttactactataataagagagtttatgtacaaaataaggtgaaattatgtataagtgttctggaccttggttgttggctcatattcacacaacctaatcaatagaaaacatatgttttattaaaacaaaatttatcatatatatatatatatatatatatatatatatatatatatataatataaaccgtagcaatgcacaggcatatgactagtggcaacttaataccatgtgtgtattaagatgaataagaggtatccaaataaataacttgttcgcttacgtctggatcgaaaggggttggaaacgattaaatctcttcctagtcaaaattaaatagaaggagatttaatcgatttctcccaatccccttcgatccaggtgcaaccgaataagtccttaaatgttgaggaacacgaaacaaccatgcattggcatgtaaagctccaagaattcgttgtatccttaacaactcacagaacatcaaccaaaattgcacgtcaagggtattgggtaagaaacaatcaaacaaatcctctctgtgtgcaaagaaacacggtgagtcatgccgagatcatactcatctgatatacatgcttacagctcacaagacattacaaacaactcatattgcattacaaagatcgtttcatgaaaaataaaataggccggaacaggacaaaaatccttgacgtgtaaagtaaatttacaacaaaaaaaaagccatatgtcaagctaaatctaattcgttttacgtagatcaacaacctgtagaaggcaacaaaactgagccacgcagaagtacagaatgattccagatgaaccatcgacgtgctacgtaaagagagtgacgagtcatatacatttggcaagaaaccatgaagctgcctacagccgtctcggtggcataagaacacaagaaattgtgttaattaatcaaagctataaataacgctcgcatgcctgtgcacttctccatcaccaccactgggtcttcagaccattagctttatctactccagagcgcagaagaacccgatcgacaccggatcctaaaccatgcgcgtgctgctcgtggccctggccctgctggctcttgctgccagcgccacctctgcccagagcgagccggagctgaagctggagagcgtggtgatcgtgagcaggcacggcgtgagggccccgaccaaggccacccagctgatgcaggacgtgaccccggacgcgttctacacctggccggtgaagctgggcgagctgaccccgaggggcggcgagctgatcgcctacctgggccactactggaggcagaggctggtggccgacggcctgctgccgaagaagggctgcccgcagagcggccaggtggccatcatcgccgacgtggacgagaggaccaggaagaccggcgaggccttcgccgccggcctggccccggactgcgccatcaccgtgcacacccaggccgacaccagcagcccggacccgctgttcaacccgctgaagaccggcgtgtgccagctggacaacgcccaggtgaccgacgccatcctggagagggccggcggcagcatcgccgacttcaccggccactaccagaccgccttcagggagctggagagggtgctgaacttcccgcagagcaacctgtgcctgaagagggagaagcaggacgagagctgcagcctgacccaggccctgccgagcgagctgaaggtgagcgccgacaacgtgagcctgaccggcgccgtgagcctggccagcatgctgaccgagattttcctgctgcagcaggcccagggcatgccggagccgggctggggcaggatcaccgacagccaccagtggaacaccctgctgagcctgcacaacgcccagttcgacctgctgcagaggaccccggaggtggccaggagcagggccaccccgctgctggacctgatcaagaccgccctgaccccgcacccgccgcagaagcaggcctacggcgtgaccctgccgaccagcgtgctgttcatcgccggccacgacaccaacctggccaacctgggcggcgccctcgagctgcagtggaccctgccgggccagccggacaacaccccgccgggcggcgagctggtgttcgagaggtggaggaggctgagcgacaacagccagtggattcaggtgagcctggtgttccagaccctgcagcagatgagggacaagaccccgctgtccctgaacaccccgccgggcgaggtgaagctgaccctggccggctgcgaggagaggaacgcccagggcatgtgcagcctggccggcttcacccagatcgtgaacgaggccaggattccggcctgcagcctggacgagctgaaggccgaggccaagtgacctaggtccccgaatttccccgatcgttcaaacatttggcaataaagtttcttaagattgaatcctgttgccggtcttgcgatgattatcatataatttctgttgaattacgttaagcatgtaataattaacatgtaatgcatgacgttatttatgagatgggtttttatgattagagtcccgcaattatacatttaatacgcgatagaaaacaaaatatagcgcgcaaactaggataaattatcgcgcgcggtgtcatctatgttactagatcgggaattg

SEQ ID NO: 66 - DNA, 2968 bp, Artificial Sequence
  Synthetic construct, pAG4259
aaagtaatcatattattttatgtgtgaatcttctttactttttcatttgattatgattatgaaggtatgaccttcataaccttcgtccgaaatccattatatccaaaggaaaataatgcttcgaaggacgaaggattttgatatttaacattttatgttgccttgttcttaattcatagcatttgagaacaagtccccaacaccaatctttatctttactatattaaagcaccagttcaacgatcgtctcgtgtcaatattattaaaaaactcctacatttctttataatcaacccgcactcttataatctcttctcttactactataataagagagtttatgtacaaaataaggtgaaattatgtataagtgttctggaccttggttgttggctcatattcacacaacctaatcaatagaaaacatatgttttattaaaacaaaatttatcatatatatatatatatatatatatatatatatatatatatataatataaaccgtagcaatgcacaggcatatgactagtggcaacttaataccatgtgtgtattaagatgaataagaggtatccaaataaataacttgttcgcttacgtctggatcgaaaggggttggaaacgattaaatctcttcctagtcaaaattaaatagaaggagatttaatcgatttctcccaatccccttcgatccaggtgcaaccgaataagtccttaaatgttgaggaacacgaaacaaccatgcattggcatgtaaagctccaagaattcgttgtatccttaacaactcacagaacatcaaccaaaattgcacgtcaagggtattgggtaagaaacaatcaaacaaatcctctctgtgtgcaaagaaacacggtgagtcatgccgagatcatactcatctgatatacatgcttacagctcacaagacattacaaacaactcatattgcattacaaagatcgtttcatgaaaaataaaataggccggaacaggacaaaaatccttgacgtgtaaagtaaatttacaacaaaaaaaaagccatatgtcaagctaaatctaattcgttttacgtagatcaacaacctgtagaaggcaacaaaactgagccacgcagaagtacagaatgattccagatgaaccatcgacgtgctacgtaaagagagtgacgagtcatatacatttggcaagaaaccatgaagctgcctacagccgtctcggtggcataagaacacaagaaattgtgttaattaatcaaagctataaataacgctcgcatgcctgtgcacttctccatcaccaccactgggtcttcagaccattagctttatctactccagagcgcagaagaacccgatcgacaccggatccaccatgagggtgttgctcgttgccctcgctctcctggctctcgctgcgagcgccaccagcgctgcgcagtccgagccggagctgaagctggagtccgtggtgatcgtgtcgcgccacggggtgcgcgccccgaccaaggccacgcagctcatgcaggacgtgaccccggacgcctggccgacctggccggtgaagctcggcgagctgaccccgcgcggcggcgagctgatcgcctacctcggccactactggcgccagcgcctcgtggccgacggcctcctcccgaagtgcggctgcccgcagtccggccaggtggcgatcatcgccgacgtggacgagcgcacccgcaagacgggcgaggccttcgccgccggcctcgccccggactgcgccatcaccgtgcacacccaggccgacacctcctccccggacccgctcttcaacccgctcaagaccggcgtgtgccagctcgacaacgccaacgtgaccgacgccatcctggagcgcgccggcggctccatcgccgacttcaccggccactaccagaccgccttccgcgagctggagcgcgtgctcaacttcccgcagtcgaacctctgcctcaagcgcgagaagcaggacgagtcctgctccctcacccaggccctcccgtccgagctgaaggtgtccgccgactgcgtgtccctcaccggcgccgtgtccctcgcctccatgctcaccgaaatcttcctcctccagcaggcccagggcatgccggagccgggctggggccgcatcaccgactcccaccagtggaacaccctcctctccctccacaacgcccagttcgacctcctccagcgcaccccggaggtggcccgctcccgcgccaccccgctcctcgacctcatcaagaccgccctcaccccgcacccgccgcagaagcaggcctacggcgtgaccctcccgacctcggtgctcttcatcgccggccacgacaccaacctcgccaacctcggcggcgccctggagctgaactggaccctcccgggccagccggacaacaccccgccgggcggcgagctggtgttcgagcgctggcgccgcctctccgacaactcccagtggattcaggtgtccctcgtgttccagaccctccagcagatgcgcgacaagaccccgctctccctcaacaccccgccgggcgaggtgaagctcaccctggccggctgcgaggagcgcaacgcgcagggcatgtgctccctcgccggcttcacccagatcgtgaacgaggcccgcatcccggcctgctccctctccgagaaggacgagctgtaacctaggtccccgaatttccccgatcgttcaaacatttggcaataaagtttcttaagattgaatcctgttgccggtcttgcgatgattatcatataatttctgttgaattacgttaagcatgtaataattaacatgtaatgcatgacgttatttatgagatgggtttttatgattagagtcccgcaattatacatttaatacgcgatagaaaacaaaatatagcgcgcaaactaggataaattatcgcgcgcggtgtcatctatgttactagatcgggaattg

SEQ ID NO: 67 - DNA, 2962 bp, Artificial Sequence
  Synthetic construct, pAG4292
aaagtaatcatattattttatgtgtgaatcttctttactttttcatttgattatgattatgaaggtatgaccttcataaccttcgtccgaaatccattatatccaaaggaaaataatgcttcgaaggacgaaggattttgatatttaacattttatgttgccttgttcttaattcatagcatttgagaacaagtccccaacaccaatctttatctttactatattaaagcaccagttcaacgatcgtctcgtgtcaatattattaaaaaactcctacatttctttataatcaacccgcactcttataatctcttctcttactactataataagagagtttatgtacaaaataaggtgaaattatgtataagtgttctggaccttggttgttggctcatattcacacaacctaatcaatagaaaacatatgttttattaaaacaaaatttatcatatatatatatatatatatatatatatatatatatatatataatataaaccgtagcaatgcacaggcatatgactagtggcaacttaataccatgtgtgtattaagatgaataagaggtatccaaataaataacttgttcgcttacgtctggatcgaaaggggttggaaacgattaaatctcttcctagtcaaaattaaatagaaggagatttaatcgatttctcccaatccccttcgatccaggtgcaaccgaataagtccttaaatgttgaggaacacgaaacaaccatgcattggcatgtaaagctccaagaattcgttgtatccttaacaactcacagaacatcaaccaaaattgcacgtcaagggtattgggtaagaaacaatcaaacaaatcctctctgtgtgcaaagaaacacggtgagtcatgccgagatcatactcatctgatatacatgcttacagctcacaagacattacaaacaactcatattgcattacaaagatcgtttcatgaaaaataaaataggccggaacaggacaaaaatccttgacgtgtaaagtaaatttacaacaaaaaaaaagccatatgtcaagctaaatctaattcgttttacgtagatcaacaacctgtagaaggcaacaaaactgagccacgcagaagtacagaatgattccagatgaaccatcgacgtgctacgtaaagagagtgacgagtcatatacatttggcaagaaaccatgaagctgcctacagccgtctcggtggcataagaacacaagaaattgtgttaattaatcaaagctataaataacgctcgcatgcctgtgcacttctccatcaccaccactgggtcttcagaccattagctttatctactccagagcgcagaagaacccgatcgacaccggatccaccatgagggtgttgctcgttgccctcgctctcctggctctcgctgcgagcgccaccagccagtcggagcctgagctgaagctggagtcggtcgtcatcgtttcccggcacggcgttagggccccaaccaagttcacacagctgatgcaggacgtgacccccgatgcttggccaacctggcctgtcaagctcggcgagctgacccccaggggcggggagctcatcgcgtacctggggcactactggcgccagcggctggtcgctgacggcctcctgccaaaggttggctgccctcagtctgggcaggtggctatcattgccgacgtcgatgagcgcaccaggaagacgggcgaggccttcgccgcggggctcgccccagactgcgctatcaccgtgcaccatcaggcggacacgtccagcccagatcctctcttcaacccgctgaagaccggcgtctgccagctggacgtggcgaatgtccgcagggctatcctggagagggccggcgggtccattgccgatttcacaaggcattaccagactgcgttcagggagctggagcgggtgctgaacttcccgcagagcaatctctgcctgaagcgcgagaagcaggacgagtcgtgctctctcacgcaggccctgccctctgagctcaaggtctcagcggacgatgtttccctgacaggcgcctggtcactggcgtccatgctcactgagattttcctcctgcagcaggctcaggggatgccggagccaggctgggggcggattacagacagccaccagtggaacactctcctgtcgctccataatgcggttttcgatctcctgcagaggacccccgaggtggctcggtcgcgcgccacgcccctcctggacctgatcaagacagctctcactccacacccgccccagaagcaggcctacggcgttaccctgcctacgtccgtgctcttcattgccggccatgataccaacctcgctaatctgggcggggccctggagctgaactggaccctgccgggccagcccgacaattacccacctggcggggagctggtgttcgagaggtggaggcgcctcagcgataactcgcagtggattcaggtgtccctcgtgttccagacactccagcagatgcgggacaagacaccgctctcactgaacactccgcccggcgaggtcaagctcacgctggccgggtgcgaggagaggaacgctcagggcatgtgctccctggctgggttcacacagattgtcaacgaggcccgcatccccgcttgctctctctccgagaaggacgagctgtaacctaggtccccgaatttccccgatcgttcaaacatttggcaataaagtttcttaagattgaatcctgttgccggtcttgcgatgattatcatataatttctgttgaattacgttaagcatgtaataattaacatgtaatgcatgacgttatttatgagatgggtttttatgattagagtcccgcaattatacatttaatacgcgatagaaaacaaaatatagcgcgcaaactaggataaattatcgcgcgcggtgtcatctatgttactagatcgggaattg

SEQ ID NO: 68 - DNA, 3580 bp, Artificial Sequence
  Synthetic construct, pAG4726
tccatgctgtcctactacttgcttcatccccttctacattttgttctggtttttggcctgcatttcggatcatgatgtatgtgatttccaatctgctgcaatatgaatggagactctgtgctaaccatcaacaacatgaaatgcttatgaggcctttgctgagcagccaatcttgcctgtgtttatgtcttcacaggccgaattcctctgttttgtttttcaccctcaatatttggaaacatttatctaggttgtttgtgtccaggcctataaatcatacatgatgttgtcgtattggatgtgaatgtggtggcgtgttcagtgccttggatttgagtttgatgagagttgcttctgggtcaccactcaccattatcgatgctcctcttcagcataaggtaaaagtcttccctgtttacgttattttacccactatggttgcttgggttggttttttcctgattgcttatgccatggaaagtcatttgatatgttgaacttgaattaactgtagaattgtatacatgttccatttgtgttgtacttccttcttttctattagtagcctcagatgagtgtgaaaaaaacagattatataacttgccctataaatcatttgaaaaaaatattgtacagtgagaaattgatatatagtgaatttttaagagcatgttttcctaaagaagtatatattttctatgtacaaaggccattgaagtaattgtagatacaggataatgtagactttttggacttacactgctacctttaagtaacaatcatgagcaatagtgttgcaatgatatttaggctgcattcgtttactctcttgatttccatgagcacgcttcccaaactgttaaactctgtgttttttgccaaaaaaaaatgcataggaaagttgcttttaaaaaatcatatcaatccattttttaagttatagctaatacttaattaatcatgcgctaataagtcactctgtttttcgtactagagagattgttttgaaccagcactcaagaacacagccttaacccagccaaataatgctacaacctaccagtccacacctcttgtaaagcatttgttgcatggaaaagctaagatgacagcaacctgttcaggaaaacaactgacaaggtcatagggagagggagcttttggaaaggtgccgtgcagttcaaacaattagttagcagtagggtgttggtttttgctcacagcaataagaagttaatcatggtgtaggcaacccaaataaaacaccaaaatatgcacaaggcagtttgttgtattctgtagtacagacaaaactaaaagtaatgaaagaagatgtggtgttagaaaaggaaacaatatcatgagtaatgtgtgggcattatgggaccacgaaataaaaagaacattttgatgagtcgtgtatcctcgatgagcctcaaaagttctctcaccccggataagaaacccttaagcaatgtgcaaagtttgcattctccactgacataatgcaaaataagatatcatcgatgacatagcaactcatgcatcatatcatgcctctctcaacctattcattcctactcatctacataagtatcttcagctaaatgttagaacataaacccataagtcacgtttgatgagtattaggcgtgacacatgacaaatcacagactcaagcaagataaagcaaaatgatgtgtacataaaactccagagctatatgtcatattgcaaaaagaggagagcttataagacaaggcatgactcacaaaaattcatttgcctttcgtgtcaaaaagaggagggctttacattatccatgtcatattgcaaaagaaagagagaaagaacaacacaatgctgcgtcaattatacatatctgtatgtccatcattattcatccacctttcgtgtaccacacttcatatatcatgagtcacttcatgtctggacattaacaaactctatcttaacatttagatgcaagagcctttatctcactataaatgcacgatgatttctcattgtttctcacaaaaagcattcagttcattagtcctacaacaacggatcctaaaccatgcgcgtgctgctcgtggccctggccctgctggctcttgctgccagcgccacctctgcccagagcgagccggagctgaagctggagagcgtggtgatcgtgagcaggcacggcgtgagggccccgaccaagttcacccagctgatgcaggacgtgaccccggacgcgttctacacctggccggtgaagctgggcgagctgaccccgaggggcggcgagctgatcgcctacctgggccactactggaggcagaggctggtggccgacggcctgctgccgaagaagggctgcccgcagagcggccaggtggccatcatcgccgacgtggacgagaggaccaggaagaccggtgaggccttcgccgccggcctggccccggactgcgccatcaccgtgcacacccaggccgacaccagcagcccggacccgctgttcaacccgctgaagaccggcgtgtgccagctggacgtggcccaggtgaccgacgccatcctggagagggccggcggcagcatcgccgacttcaccggccactaccagaccgccttcagggagctggagagggtgctgaacttcccgcagagcaacctggccctgaagagggagaagcaggacgagagcgccagcctgacccaggccctgccgagcgagctgaaggtgagcgccgacaacgtgagcctgaccggcgcctggagcctggccagcatgctgaccgagattttcctgctgcagcaggcccagggcatgccggagccgggctggggcaggatcaccgacagccaccagtggaacaccctgctgagcctgcacaacgcccagttcgacctgctgcagaggaccccggaggtggccaggagcagggccaccccgctgctggacctgatcaagaccgccctgaccccgcacccgccgcagaagcaggcctacggcgtgaccctgccgaccagcgtgctgttcatcgccggccacgacaccaacctggccaacctgggcggcgccctcgagctgcagtggaccctgccgggccagccggacaacaccccgccgggcggcgagctggtgttcgagaggtggaggaggctgagcgacaacagccagtggattcaggtgagcctggtgttccagaccctgcagcagatgagggacaagaccccgctgttcctgaacaccccgccgggcgaggtgaagctgaccctggccggctgcgaggagaggaacgcccagggcatgtgcagcctggccggcttcacccagatcgtgaacgaggccaggattccggcctgcagcctgagcgagaaggacgagctgtgacctaggctgcacaaagtggagtagtcagtcatcgatcaggaaccagacaccagacttttattcatacagtgaagtgaagtgaagtgcagtgcagtgagttgctggtttttgtacaacttagtatgtatttgtatttgtaaaatacttctatcaataaaatttctaattcctaaaaccaaaatccag

SEQ ID NO: 69 - DNA, 3586 bp, Artificial Sequence
  Synthetic construct, pAG4799
tccatgctgtcctactacttgcttcatccccttctacattttgttctggtttttggcctgcatttcggatcatgatgtatgtgatttccaatctgctgcaatatgaatggagactctgtgctaaccatcaacaacatgaaatgcttatgaggcctttgctgagcagccaatcttgcctgtgtttatgtcttcacaggccgaattcctctgttttgtttttcaccctcaatatttggaaacatttatctaggttgtttgtgtccaggcctataaatcatacatgatgttgtcgtattggatgtgaatgtggtggcgtgttcagtgccttggatttgagtttgatgagagttgcttctgggtcaccactcaccattatcgatgctcctcttcagcataaggtaaaagtcttccctgtttacgttattttacccactatggttgcttgggttggttttttcctgattgcttatgccatggaaagtcatttgatatgttgaacttgaattaactgtagaattgtatacatgttccatttgtgttgtacttccttcttttctattagtagcctcagatgagtgtgaaaaaaacagattatataacttgccctataaatcatttgaaaaaaatattgtacagtgagaaattgatatatagtgaatttttaagagcatgttttcctaaagaagtatatattttctatgtacaaaggccattgaagtaattgtagatacaggataatgtagactttttggacttacactgctacctttaagtaacaatcatgagcaatagtgttgcaatgatatttaggctgcattcgtttactctcttgatttccatgagcacgcttcccaaactgttaaactctgtgttttttgccaaaaaaaaatgcataggaaagttgcttttaaaaaatcatatcaatccattttttaagttatagctaatacttaattaatcatgcgctaataagtcactctgtttttcgtactagagagattgttttgaaccagcactcaagaacacagccttaacccagccaaataatgctacaacctaccagtccacacctcttgtaaagcatttgttgcatggaaaagctaagatgacagcaacctgttcaggaaaacaactgacaaggtcatagggagagggagcttttggaaaggtgccgtgcagttcaaacaattagttagcagtagggtgttggtttttgctcacagcaataagaagttaatcatggtgtaggcaacccaaataaaacaccaaaatatgcacaaggcagtttgttgtattctgtagtacagacaaaactaaaagtaatgaaagaagatgtggtgttagaaaaggaaacaatatcatgagtaatgtgtgggcattatgggaccacgaaataaaaagaacattttgatgagtcgtgtatcctcgatgagcctcaaaagttctctcaccccggataagaaacccttaagcaatgtgcaaagtttgcattctccactgacataatgcaaaataagatatcatcgatgacatagcaactcatgcatcatatcatgcctctctcaacctattcattcctactcatctacataagtatcttcagctaaatgttagaacataaacccataagtcacgtttgatgagtattaggcgtgacacatgacaaatcacagactcaagcaagataaagcaaaatgatgtgtacataaaactccagagctatatgtcatattgcaaaaagaggagagcttataagacaaggcatgactcacaaaaattcatttgcctttcgtgtcaaaaagaggagggctttacattatccatgtcatattgcaaaagaaagagagaaagaacaacacaatgctgcgtcaattatacatatctgtatgtccatcattattcatccacctttcgtgtaccacacttcatatatcatgagtcacttcatgtctggacattaacaaactctatcttaacatttagatgcaagagcctttatctcactataaatgcacgatgatttctcattgtttctcacaaaaagcattcagttcattagtcctacaacaacggatcctaaaccatgcgcgtgctgctcgtggccctggccctgctggctcttgctgccagcgccacctctgcccagagcgagccggagctgaagctggagagcgtggtgatcgtgagcaggcacggcgtgagggccccgaccaagttcacccagctgatgcaggacgtgaccccggacgcgttctacacctggccggtgaagctgggcgagctgaccccgaggggcggcgagctgatcgcctacctgggccactactggaggcagaggctggtggccgacggcctgctgccgaagaagggctgcccgcagagcggccaggtggccatcatcgccgacgtggacgagaggaccaggaagaccggtgaggccttcgccgccggcctggccccggactgcgccatcaccgtgcacacccaggccgacaccagcagcccggacccgctgttcaacccgctgaagaccggcgtgtgccagctggacgtggcccaggtgaccgacgccatcctggagagggccggcggcagcatcgccgacttcaccggccactaccagaccgccttcagggagctggagagggtgctgaacttcccgcagagcaacctggccctgaagagggagaagcaggacgagagcgccagcctgacccaggccctgccgagcgagctgaaggtgagcgccgacaacgtgagcctgaccggcgcctggagcctggccagcatgctgaccgagattttcctgctgcagcaggcccagggcatgccggagccgggctggggcaggatcaccgacagccaccagtggaacaccctgctgagcctgcacaacgcccagttcgacctgctgcagaggaccccggaggtggccaggagcagggccaccccgctgctggacctgatcaagaccgccctgaccccgcacccgccgcagaagcaggcctacggcgtgaccctgccgaccagcgtgctgttcatcgccggccacgacaccaacctggccaacctgggcggcgccctcgagctgcagtggaccctgccgggccagccggacaacaccccgccgggcggcgagctggtgttcgagaggtggaggaggctgagcgacaacagccagtggattcaggtgagcctggtgttccagaccctgcagcagatgagggacaagaccccgctgttcctgaacaccccgccgggcgaggtgaagctgaccctggccggctgcgaggagaggaacgcccagggcatgtgcagcctggccggcttcacccagatcgtgaacgaggccaggattccggcctgcagcctggacgagctgaaggccgaggccaagtgacctaggctgcacaaagtggagtagtcagtcatcgatcaggaaccagacaccagacttttattcatacagtgaagtgaagtgaagtgcagtgcagtgagttgctggtttttgtacaacttagtatgtatttgtatttgtaaaatacttctatcaataaaatttctaattcctaaaaccaaaatccag

SEQ ID NO: 70 - DNA, 3580 bp, Artificial Sequence
  Synthetic construct, pAG4912
tccatgctgtcctactacttgcttcatccccttctacattttgttctggtttttggcctgcatttcggatcatgatgtatgtgatttccaatctgctgcaatatgaatggagactctgtgctaaccatcaacaacatgaaatgcttatgaggcctttgctgagcagccaatcttgcctgtgtttatgtcttcacaggccgaattcctctgttttgtttttcaccctcaatatttggaaacatttatctaggttgtttgtgtccaggcctataaatcatacatgatgttgtcgtattggatgtgaatgtggtggcgtgttcagtgccttggatttgagtttgatgagagttgcttctgggtcaccactcaccattatcgatgctcctcttcagcataaggtaaaagtcttccctgtttacgttattttacccactatggttgcttgggttggttttttcctgattgcttatgccatggaaagtcatttgatatgttgaacttgaattaactgtagaattgtatacatgttccatttgtgttgtacttccttcttttctattagtagcctcagatgagtgtgaaaaaaacagattatataacttgccctataaatcatttgaaaaaaatattgtacagtgagaaattgatatatagtgaatttttaagagcatgttttcctaaagaagtatatattttctatgtacaaaggccattgaagtaattgtagatacaggataatgtagactttttggacttacactgctacctttaagtaacaatcatgagcaatagtgttgcaatgatatttaggctgcattcgtttactctcttgatttccatgagcacgcttcccaaactgttaaactctgtgttttttgccaaaaaaaaatgcataggaaagttgcttttaaaaaatcatatcaatccattttttaagttatagctaatacttaattaatcatgcgctaataagtcactctgtttttcgtactagagagattgttttgaaccagcactcaagaacacagccttaacccagccaaataatgctacaacctaccagtccacacctcttgtaaagcatttgttgcatggaaaagctaagatgacagcaacctgttcaggaaaacaactgacaaggtcatagggagagggagcttttggaaaggtgccgtgcagttcaaacaattagttagcagtagggtgttggtttttgctcacagcaataagaagttaatcatggtgtaggcaacccaaataaaacaccaaaatatgcacaaggcagtttgttgtattctgtagtacagacaaaactaaaagtaatgaaagaagatgtggtgttagaaaaggaaacaatatcatgagtaatgtgtgggcattatgggaccacgaaataaaaagaacattttgatgagtcgtgtatcctcgatgagcctcaaaagttctctcaccccggataagaaacccttaagcaatgtgcaaagtttgcattctccactgacataatgcaaaataagatatcatcgatgacatagcaactcatgcatcatatcatgcctctctcaacctattcattcctactcatctacataagtatcttcagctaaatgttagaacataaacccataagtcacgtttgatgagtattaggcgtgacacatgacaaatcacagactcaagcaagataaagcaaaatgatgtgtacataaaactccagagctatatgtcatattgcaaaaagaggagagcttataagacaaggcatgactcacaaaaattcatttgcctttcgtgtcaaaaagaggagggctttacattatccatgtcatattgcaaaagaaagagagaaagaacaacacaatgctgcgtcaattatacatatctgtatgtccatcattattcatccacctttcgtgtaccacacttcatatatcatgagtcacttcatgtctggacattaacaaactctatcttaacatttagatgcaagagcctttatctcactataaatgcacgatgatttctcattgtttctcacaaaaagcattcagttcattagtcctacaacaacggatccaccatgagggtgttgctcgttgccctcgctctcctggctctcgctgcgagcgccaccagcgctgcgcagtccgagccggagctgaagctggagtccgtggtgatcgtgtcgcgccacggggtgcgcgccccgaccaagttcacgcagctcatgcaggacgtgaccccggacgccttctacacctggccggtgaagctcggcgagctgaccccgcgcggcggcgagctgatcgcctacctcggccactactggcgccagcgcctcgtggccgacggcctcctcccgaagaagggctgcccgcagtccggccaggtggcgatcatcgccgacgtggacgagcgcacccgcaagacgggcgaggccttcgccgccggcctcgccccggactgcgccatcaccgtgcacacccaggccgacacctcctccccggacccgctcttcaacccgctcaagaccggcgtgtgccagctcgacgtggcccaggtgaccgacgccatcctggagcgcgccggcggctccatcgccgacttcaccggccactaccagaccgccttccgcgagctggagcgcgtgctcaacttcccgcagtcgaacctcgccctcaagcgcgagaagcaggacgagtccgcctccctcacccaggccctcccgtccgagctgaaggtgtccgccgacaacgtgtccctcaccggcgcctggtccctcgcctccatgctcaccgaaatcttcctcctccagcaggcccagggcatgccggagccgggctggggccgcatcaccgactcccaccagtggaacaccctcctctccctccacaacgcccagttcgacctcctccagcgcaccccggaggtggcccgctcccgcgccaccccgctcctcgacctcatcaagaccgccctcaccccgcacccgccgcagaagcaggcctacggcgtgaccctcccgacctcggtgctcttcatcgccggccacgacaccaacctcgccaacctcggcggcgccctggagctgcagtggaccctcccgggccagccggacaacaccccgccgggcggcgagctggtgttcgagcgctggcgccgcctctccgacaactcccagtggattcaggtgtccctcgtgttccagaccctccagcagatgcgcgacaagaccccgctcttcctcaacaccccgccgggcgaggtgaagctcaccctggccggctgcgaggagcgcaacgcgcagggcatgtgctccctcgccggcttcacccagatcgtgaacgaggcccgcatcccggcctgctccctctccgagaaggacgagctgtaacctaggctgcacaaagtggagtagtcagtcatcgatcaggaaccagacaccagacttttattcatacagtgaagtgaagtgaagtgcagtgcagtgagttgctggtttttgtacaacttagtatgtatttgtatttgtaaaatacttctatcaataaaatttctaattcctaaaaccaaaatccag

SEQ ID NO: 71 - DNA, 3580 bp, Artificial Sequence
  Synthetic construct, pAG4727
tccatgctgtcctactacttgcttcatccccttctacattttgttctggtttttggcctgcatttcggatcatgatgtatgtgatttccaatctgctgcaatatgaatggagactctgtgctaaccatcaacaacatgaaatgcttatgaggcctttgctgagcagccaatcttgcctgtgtttatgtcttcacaggccgaattcctctgttttgtttttcaccctcaatatttggaaacatttatctaggttgtttgtgtccaggcctataaatcatacatgatgttgtcgtattggatgtgaatgtggtggcgtgttcagtgccttggatttgagtttgatgagagttgcttctgggtcaccactcaccattatcgatgctcctcttcagcataaggtaaaagtcttccctgtttacgttattttacccactatggttgcttgggttggttttttcctgattgcttatgccatggaaagtcatttgatatgttgaacttgaattaactgtagaattgtatacatgttccatttgtgttgtacttccttcttttctattagtagcctcagatgagtgtgaaaaaaacagattatataacttgccctataaatcatttgaaaaaaatattgtacagtgagaaattgatatatagtgaatttttaagagcatgttttcctaaagaagtatatattttctatgtacaaaggccattgaagtaattgtagatacaggataatgtagactttttggacttacactgctacctttaagtaacaatcatgagcaatagtgttgcaatgatatttaggctgcattcgtttactctcttgatttccatgagcacgcttcccaaactgttaaactctgtgttttttgccaaaaaaaaatgcataggaaagttgcttttaaaaaatcatatcaatccattttttaagttatagctaatacttaattaatcatgcgctaataagtcactctgtttttcgtactagagagattgttttgaaccagcactcaagaacacagccttaacccagccaaataatgctacaacctaccagtccacacctcttgtaaagcatttgttgcatggaaaagctaagatgacagcaacctgttcaggaaaacaactgacaaggtcatagggagagggagcttttggaaaggtgccgtgcagttcaaacaattagttagcagtagggtgttggtttttgctcacagcaataagaagttaatcatggtgtaggcaacccaaataaaacaccaaaatatgcacaaggcagtttgttgtattctgtagtacagacaaaactaaaagtaatgaaagaagatgtggtgttagaaaaggaaacaatatcatgagtaatgtgtgggcattatgggaccacgaaataaaaagaacattttgatgagtcgtgtatcctcgatgagcctcaaaagttctctcaccccggataagaaacccttaagcaatgtgcaaagtttgcattctccactgacataatgcaaaataagatatcatcgatgacatagcaactcatgcatcatatcatgcctctctcaacctattcattcctactcatctacataagtatcttcagctaaatgttagaacataaacccataagtcacgtttgatgagtattaggcgtgacacatgacaaatcacagactcaagcaagataaagcaaaatgatgtgtacataaaactccagagctatatgtcatattgcaaaaagaggagagcttataagacaaggcatgactcacaaaaattcatttgcctttcgtgtcaaaaagaggagggctttacattatccatgtcatattgcaaaagaaagagagaaagaacaacacaatgctgcgtcaattatacatatctgtatgtccatcattattcatccacctttcgtgtaccacacttcatatatcatgagtcacttcatgtctggacattaacaaactctatcttaacatttagatgcaagagcctttatctcactataaatgcacgatgatttctcattgtttctcacaaaaagcattcagttcattagtcctacaacaacggatcctaaaccatgcgcgtgctgctcgtggccctggccctgctggctcttgctgccagcgccacctctgcccagagcgagccggagctgaagctggagagcgtggtgatcgtgagcaggcacggcgtgagggccccgaccaaggccacccagctgatgcaggacgtgaccccggacgcgttctacacctggccggtgaagctgggcgagctgaccccgaggggcggcgagctgatcgcctacctgggccactactggaggcagaggctggtggccgacggcctgctgccgaagaagggctgcccgcagagcggccaggtggccatcatcgccgacgtggacgagaggaccaggaagaccggcgaggccttcgccgccggcctggccccggactgcgccatcaccgtgcacacccaggccgacaccagcagcccggacccgctgttcaacccgctgaagaccggcgtgtgccagctggacaacgcccaggtgaccgacgccatcctggagagggccggcggcagcatcgccgacttcaccggccactaccagaccgccttcagggagctggagagggtgctgaacttcccgcagagcaacctgtgcctgaagagggagaagcaggacgagagctgcagcctgacccaggccctgccgagcgagctgaaggtgagcgccgacaacgtgagcctgaccggcgccgtgagcctggccagcatgctgaccgagattttcctgctgcagcaggcccagggcatgccggagccgggctggggcaggatcaccgacagccaccagtggaacaccctgctgagcctgcacaacgcccagttcgacctgctgcagaggaccccggaggtggccaggagcagggccaccccgctgctggacctgatcaagaccgccctgaccccgcacccgccgcagaagcaggcctacggcgtgaccctgccgaccagcgtgctgttcatcgccggccacgacaccaacctggccaacctgggcggcgccctcgagctgcagtggaccctgccgggccagccggacaacaccccgccgggcggcgagctggtgttcgagaggtggaggaggctgagcgacaacagccagtggattcaggtgagcctggtgttccagaccctgcagcagatgagggacaagaccccgctgtccctgaacaccccgccgggcgaggtgaagctgaccctggccggctgcgaggagaggaacgcccagggcatgtgcagcctggccggcttcacccagatcgtgaacgaggccaggattccggcctgcagcctgagcgagaaggacgagctgtgacctaggctgcacaaagtggagtagtcagtcatcgatcaggaaccagacaccagacttttattcatacagtgaagtgaagtgaagtgcagtgcagtgagttgctggtttttgtacaacttagtatgtatttgtatttgtaaaatacttctatcaataaaatttctaattcctaaaaccaaaatccag

SEQ ID NO: 72 - DNA, 3586 bp, Artificial Sequence
  Synthetic construct, pAG4801
tccatgctgtcctactacttgcttcatccccttctacattttgttctggtttttggcctgcatttcggatcatgatgtatgtgatttccaatctgctgcaatatgaatggagactctgtgctaaccatcaacaacatgaaatgcttatgaggcctttgctgagcagccaatcttgcctgtgtttatgtcttcacaggccgaattcctctgttttgtttttcaccctcaatatttggaaacatttatctaggttgtttgtgtccaggcctataaatcatacatgatgttgtcgtattggatgtgaatgtggtggcgtgttcagtgccttggatttgagtttgatgagagttgcttctgggtcaccactcaccattatcgatgctcctcttcagcataaggtaaaagtcttccctgtttacgttattttacccactatggttgcttgggttggttttttcctgattgcttatgccatggaaagtcatttgatatgttgaacttgaattaactgtagaattgtatacatgttccatttgtgttgtacttccttcttttctattagtagcctcagatgagtgtgaaaaaaacagattatataacttgccctataaatcatttgaaaaaaatattgtacagtgagaaattgatatatagtgaatttttaagagcatgttttcctaaagaagtatatattttctatgtacaaaggccattgaagtaattgtagatacaggataatgtagactttttggacttacactgctacctttaagtaacaatcatgagcaatagtgttgcaatgatatttaggctgcattcgtttactctcttgatttccatgagcacgcttcccaaactgttaaactctgtgttttttgccaaaaaaaaatgcataggaaagttgcttttaaaaaatcatatcaatccattttttaagttatagctaatacttaattaatcatgcgctaataagtcactctgtttttcgtactagagagattgttttgaaccagcactcaagaacacagccttaacccagccaaataatgctacaacctaccagtccacacctcttgtaaagcatttgttgcatggaaaagctaagatgacagcaacctgttcaggaaaacaactgacaaggtcatagggagagggagcttttggaaaggtgccgtgcagttcaaacaattagttagcagtagggtgttggtttttgctcacagcaataagaagttaatcatggtgtaggcaacccaaataaaacaccaaaatatgcacaaggcagtttgttgtattctgtagtacagacaaaactaaaagtaatgaaagaagatgtggtgttagaaaaggaaacaatatcatgagtaatgtgtgggcattatgggaccacgaaataaaaagaacattttgatgagtcgtgtatcctcgatgagcctcaaaagttctctcaccccggataagaaacccttaagcaatgtgcaaagtttgcattctccactgacataatgcaaaataagatatcatcgatgacatagcaactcatgcatcatatcatgcctctctcaacctattcattcctactcatctacataagtatcttcagctaaatgttagaacataaacccataagtcacgtttgatgagtattaggcgtgacacatgacaaatcacagactcaagcaagataaagcaaaatgatgtgtacataaaactccagagctatatgtcatattgcaaaaagaggagagcttataagacaaggcatgactcacaaaaattcatttgcctttcgtgtcaaaaagaggagggctttacattatccatgtcatattgcaaaagaaagagagaaagaacaacacaatgctgcgtcaattatacatatctgtatgtccatcattattcatccacctttcgtgtaccacacttcatatatcatgagtcacttcatgtctggacattaacaaactctatcttaacatttagatgcaagagcctttatctcactataaatgcacgatgatttctcattgtttctcacaaaaagcattcagttcattagtcctacaacaacggatcctaaaccatgcgcgtgctgctcgtggccctggccctgctggctcttgctgccagcgccacctctgcccagagcgagccggagctgaagctggagagcgtggtgatcgtgagcaggcacggcgtgagggccccgaccaaggccacccagctgatgcaggacgtgaccccggacgcgttctacacctggccggtgaagctgggcgagctgaccccgaggggcggcgagctgatcgcctacctgggccactactggaggcagaggctggtggccgacggcctgctgccgaagaagggctgcccgcagagcggccaggtggccatcatcgccgacgtggacgagaggaccaggaagaccggcgaggccttcgccgccggcctggccccggactgcgccatcaccgtgcacacccaggccgacaccagcagcccggacccgctgttcaacccgctgaagaccggcgtgtgccagctggacaacgcccaggtgaccgacgccatcctggagagggccggcggcagcatcgccgacttcaccggccactaccagaccgccttcagggagctggagagggtgctgaacttcccgcagagcaacctgtgcctgaagagggagaagcaggacgagagctgcagcctgacccaggccctgccgagcgagctgaaggtgagcgccgacaacgtgagcctgaccggcgccgtgagcctggccagcatgctgaccgagattttcctgctgcagcaggcccagggcatgccggagccgggctggggcaggatcaccgacagccaccagtggaacaccctgctgagcctgcacaacgcccagttcgacctgctgcagaggaccccggaggtggccaggagcagggccaccccgctgctggacctgatcaagaccgccctgaccccgcacccgccgcagaagcaggcctacggcgtgaccctgccgaccagcgtgctgttcatcgccggccacgacaccaacctggccaacctgggcggcgccctcgagctgcagtggaccctgccgggccagccggacaacaccccgccgggcggcgagctggtgttcgagaggtggaggaggctgagcgacaacagccagtggattcaggtgagcctggtgttccagaccctgcagcagatgagggacaagaccccgctgtccctgaacaccccgccgggcgaggtgaagctgaccctggccggctgcgaggagaggaacgcccagggcatgtgcagcctggccggcttcacccagatcgtgaacgaggccaggattccggcctgcagcctggacgagctgaaggccgaggccaagtgacctaggctgcacaaagtggagtagtcagtcatcgatcaggaaccagacaccagacttttattcatacagtgaagtgaagtgaagtgcagtgcagtgagttgctggtttttgtacaacttagtatgtatttgtatttgtaaaatacttctatcaataaaatttctaattcctaaaaccaaaatccag

SEQ ID NO: 73 - DNA, 3580 bp, Artificial Sequence
  Synthetic construct, pAG4717
tccatgctgtcctactacttgcttcatccccttctacattttgttctggtttttggcctgcatttcggatcatgatgtatgtgatttccaatctgctgcaatatgaatggagactctgtgctaaccatcaacaacatgaaatgcttatgaggcctttgctgagcagccaatcttgcctgtgtttatgtcttcacaggccgaattcctctgttttgtttttcaccctcaatatttggaaacatttatctaggttgtttgtgtccaggcctataaatcatacatgatgttgtcgtattggatgtgaatgtggtggcgtgttcagtgccttggatttgagtttgatgagagttgcttctgggtcaccactcaccattatcgatgctcctcttcagcataaggtaaaagtcttccctgtttacgttattttacccactatggttgcttgggttggttttttcctgattgcttatgccatggaaagtcatttgatatgttgaacttgaattaactgtagaattgtatacatgttccatttgtgttgtacttccttcttttctattagtagcctcagatgagtgtgaaaaaaacagattatataacttgccctataaatcatttgaaaaaaatattgtacagtgagaaattgatatatagtgaatttttaagagcatgttttcctaaagaagtatatattttctatgtacaaaggccattgaagtaattgtagatacaggataatgtagactttttggacttacactgctacctttaagtaacaatcatgagcaatagtgttgcaatgatatttaggctgcattcgtttactctcttgatttccatgagcacgcttcccaaactgttaaactctgtgttttttgccaaaaaaaaatgcataggaaagttgcttttaaaaaatcatatcaatccattttttaagttatagctaatacttaattaatcatgcgctaataagtcactctgtttttcgtactagagagattgttttgaaccagcactcaagaacacagccttaacccagccaaataatgctacaacctaccagtccacacctcttgtaaagcatttgttgcatggaaaagctaagatgacagcaacctgttcaggaaaacaactgacaaggtcatagggagagggagcttttggaaaggtgccgtgcagttcaaacaattagttagcagtagggtgttggtttttgctcacagcaataagaagttaatcatggtgtaggcaacccaaataaaacaccaaaatatgcacaaggcagtttgttgtattctgtagtacagacaaaactaaaagtaatgaaagaagatgtggtgttagaaaaggaaacaatatcatgagtaatgtgtgggcattatgggaccacgaaataaaaagaacattttgatgagtcgtgtatcctcgatgagcctcaaaagttctctcaccccggataagaaacccttaagcaatgtgcaaagtttgcattctccactgacataatgcaaaataagatatcatcgatgacatagcaactcatgcatcatatcatgcctctctcaacctattcattcctactcatctacataagtatcttcagctaaatgttagaacataaacccataagtcacgtttgatgagtattaggcgtgacacatgacaaatcacagactcaagcaagataaagcaaaatgatgtgtacataaaactccagagctatatgtcatattgcaaaaagaggagagcttataagacaaggcatgactcacaaaaattcatttgcctttcgtgtcaaaaagaggagggctttacattatccatgtcatattgcaaaagaaagagagaaagaacaacacaatgctgcgtcaattatacatatctgtatgtccatcattattcatccacctttcgtgtaccacacttcatatatcatgagtcacttcatgtctggacattaacaaactctatcttaacatttagatgcaagagcctttatctcactataaatgcacgatgatttctcattgtttctcacaaaaagcattcagttcattagtcctacaacaacggatccaccatgagggtgttgctcgttgccctcgctctcctggctctcgctgcgagcgccaccagcgctgcgcagtccgagccggagctgaagctggagtccgtggtgatcgtgtcgcgccacggggtgcgcgccccgaccaaggccacgcagctcatgcaggacgtgaccccggacgcctggccgacctggccggtgaagctcggcgagctgaccccgcgcggcggcgagctgatcgcctacctcggccactactggcgccagcgcctcgtggccgacggcctcctcccgaagtgcggctgcccgcagtccggccaggtggcgatcatcgccgacgtggacgagcgcacccgcaagacgggcgaggccttcgccgccggcctcgccccggactgcgccatcaccgtgcacacccaggccgacacctcctccccggacccgctcttcaacccgctcaagaccggcgtgtgccagctcgacaacgccaacgtgaccgacgccatcctggagcgcgccggcggctccatcgccgacttcaccggccactaccagaccgccttccgcgagctggagcgcgtgctcaacttcccgcagtcgaacctctgcctcaagcgcgagaagcaggacgagtcctgctccctcacccaggccctcccgtccgagctgaaggtgtccgccgactgcgtgtccctcaccggcgccgtgtccctcgcctccatgctcaccgaaatcttcctcctccagcaggcccagggcatgccggagccgggctggggccgcatcaccgactcccaccagtggaacaccctcctctccctccacaacgcccagttcgacctcctccagcgcaccccggaggtggcccgctcccgcgccaccccgctcctcgacctcatcaagaccgccctcaccccgcacccgccgcagaagcaggcctacggcgtgaccctcccgacctcggtgctcttcatcgccggccacgacaccaacctcgccaacctcggcggcgccctggagctgaactggaccctcccgggccagccggacaacaccccgccgggcggcgagctggtgttcgagcgctggcgccgcctctccgacaactcccagtggattcaggtgtccctcgtgttccagaccctccagcagatgcgcgacaagaccccgctctccctcaacaccccgccgggcgaggtgaagctcaccctggccggctgcgaggagcgcaacgcgcagggcatgtgctccctcgccggcttcacccagatcgtgaacgaggcccgcatcccggcctgctccctctccgagaaggacgagctgtaacctaggctgcacaaagtggagtagtcagtcatcgatcaggaaccagacaccagacttttattcatacagtgaagtgaagtgaagtgcagtgcagtgagttgctggtttttgtacaacttagtatgtatttgtatttgtaaaatacttctatcaataaaatttctaattcctaaaaccaaaatccag

SEQ ID NO: 74 - DNA, 3586 bp, Artificial Sequence
  Synthetic construct, pAG4802
tccatgctgtcctactacttgcttcatccccttctacattttgttctggtttttggcctgcatttcggatcatgatgtatgtgatttccaatctgctgcaatatgaatggagactctgtgctaaccatcaacaacatgaaatgcttatgaggcctttgctgagcagccaatcttgcctgtgtttatgtcttcacaggccgaattcctctgttttgtttttcaccctcaatatttggaaacatttatctaggttgtttgtgtccaggcctataaatcatacatgatgttgtcgtattggatgtgaatgtggtggcgtgttcagtgccttggatttgagtttgatgagagttgcttctgggtcaccactcaccattatcgatgctcctcttcagcataaggtaaaagtcttccctgtttacgttattttacccactatggttgcttgggttggttttttcctgattgcttatgccatggaaagtcatttgatatgttgaacttgaattaactgtagaattgtatacatgttccatttgtgttgtacttccttcttttctattagtagcctcagatgagtgtgaaaaaaacagattatataacttgccctataaatcatttgaaaaaaatattgtacagtgagaaattgatatatagtgaatttttaagagcatgttttcctaaagaagtatatattttctatgtacaaaggccattgaagtaattgtagatacaggataatgtagactttttggacttacactgctacctttaagtaacaatcatgagcaatagtgttgcaatgatatttaggctgcattcgtttactctcttgatttccatgagcacgcttcccaaactgttaaactctgtgttttttgccaaaaaaaaatgcataggaaagttgcttttaaaaaatcatatcaatccattttttaagttatagctaatacttaattaatcatgcgctaataagtcactctgtttttcgtactagagagattgttttgaaccagcactcaagaacacagccttaacccagccaaataatgctacaacctaccagtccacacctcttgtaaagcatttgttgcatggaaaagctaagatgacagcaacctgttcaggaaaacaactgacaaggtcatagggagagggagcttttggaaaggtgccgtgcagttcaaacaattagttagcagtagggtgttggtttttgctcacagcaataagaagttaatcatggtgtaggcaacccaaataaaacaccaaaatatgcacaaggcagtttgttgtattctgtagtacagacaaaactaaaagtaatgaaagaagatgtggtgttagaaaaggaaacaatatcatgagtaatgtgtgggcattatgggaccacgaaataaaaagaacattttgatgagtcgtgtatcctcgatgagcctcaaaagttctctcaccccggataagaaacccttaagcaatgtgcaaagtttgcattctccactgacataatgcaaaataagatatcatcgatgacatagcaactcatgcatcatatcatgcctctctcaacctattcattcctactcatctacataagtatcttcagctaaatgttagaacataaacccataagtcacgtttgatgagtattaggcgtgacacatgacaaatcacagactcaagcaagataaagcaaaatgatgtgtacataaaactccagagctatatgtcatattgcaaaaagaggagagcttataagacaaggcatgactcacaaaaattcatttgcctttcgtgtcaaaaagaggagggctttacattatccatgtcatattgcaaaagaaagagagaaagaacaacacaatgctgcgtcaattatacatatctgtatgtccatcattattcatccacctttcgtgtaccacacttcatatatcatgagtcacttcatgtctggacattaacaaactctatcttaacatttagatgcaagagcctttatctcactataaatgcacgatgatttctcattgtttctcacaaaaagcattcagttcattagtcctacaacaacggatccaccatgagggtgttgctcgttgccctcgctctcctggctctcgctgcgagcgccaccagcgctgcgcagtccgagccggagctgaagctggagtccgtggtgatcgtgtcgcgccacggggtgcgcgccccgaccaaggccacgcagctcatgcaggacgtgaccccggacgcctggccgacctggccggtgaagctcggcgagctgaccccgcgcggcggcgagctgatcgcctacctcggccactactggcgccagcgcctcgtggccgacggcctcctcccgaagtgcggctgcccgcagtccggccaggtggcgatcatcgccgacgtggacgagcgcacccgcaagacgggcgaggccttcgccgccggcctcgccccggactgcgccatcaccgtgcacacccaggccgacacctcctccccggacccgctcttcaacccgctcaagaccggcgtgtgccagctcgacaacgccaacgtgaccgacgccatcctggagcgcgccggcggctccatcgccgacttcaccggccactaccagaccgccttccgcgagctggagcgcgtgctcaacttcccgcagtcgaacctctgcctcaagcgcgagaagcaggacgagtcctgctccctcacccaggccctcccgtccgagctgaaggtgtccgccgactgcgtgtccctcaccggcgccgtgtccctcgcctccatgctcaccgaaatcttcctcctccagcaggcccagggcatgccggagccgggctggggccgcatcaccgactcccaccagtggaacaccctcctctccctccacaacgcccagttcgacctcctccagcgcaccccggaggtggcccgctcccgcgccaccccgctcctcgacctcatcaagaccgccctcaccccgcacccgccgcagaagcaggcctacggcgtgaccctcccgacctcggtgctcttcatcgccggccacgacaccaacctcgccaacctcggcggcgccctggagctgaactggaccctcccgggccagccggacaacaccccgccgggcggcgagctggtgttcgagcgctggcgccgcctctccgacaactcccagtggattcaggtgtccctcgtgttccagaccctccagcagatgcgcgacaagaccccgctctccctcaacaccccgccgggcgaggtgaagctcaccctggccggctgcgaggagcgcaacgcgcagggcatgtgctccctcgccggcttcacccagatcgtgaacgaggcccgcatcccggcctgctccctcgacgagctgaaggccgaggccaagtaacctaggctgcacaaagtggagtagtcagtcatcgatcaggaaccagacaccagacttttattcatacagtgaagtgaagtgaagtgcagtgcagtgagttgctggtttttgtacaacttagtatgtatttgtatttgtaaaatacttctatcaataaaatttctaattcctaaaaccaaaatccag

SEQ ID NO: 75 - DNA, 3079 bp, Artificial Sequence
  Synthetic construct, pAG4268
tacagggttccttgcgtgaagaagggtggcctgcggttcaccattaacggtcacgactacttccagctagtactggtgaccaacgtcgcggcggcagggtcaatcaagtccatggaggttatgggttccaacacagcggattggatgccgatggcacgtaactggggcgcccaatggcactcactggcctacctcaccggtcaaggtctatcctttagggtcaccaacacagatgaccaaacgctcgtcttcaccaacgtcgtgccaccaggatggaagtttggccagacatttgcaagcaagctgcagttcaagtgagaggagaagcctgaattgataccggagcgtttcttttgggagtaacatctctggttgcctagcaaacatatgattgtatataagtttcgttgtgcgtttattctttcggtgtgtaaaataacatacatgctttcctgatattttcttgtatatatgtacacacacacgacaaatccttccatttctattattattgaacaatttaattgcgagggcgagtacttgtctgtttaccttttttttttcagatggcattttatagtttaacctttcatggaccggcagtagttctaaccatgaatgaaaagaaatcatagtccacaccacgcagggacattgtggtcattttagacaagacgatttgattaatgtcttgtatgatatggtcgacagtgaggactaacaaacatatggcatattttattaccggcgagttaaataaatttatgtcacagtaataaactgcctaataaatgcacgccagaaaatataatgataaaaaaaagaaaagatacataagtccattgcttctacttttttaaaaattaaatccaacattttctattttttggtataaacttggaagtactagttggatatgcaaaatcatctaacctccatatatttcatcaatttgtttactttacatatgggagaggatagtatgtcaaagaaaatgacaacaagcttacaagtttcttattttaaaagttccgctaacttatcaagcatagtgtgccacgcaaaactgacaacaaaccaacaaatttaaggagcgcctaacttatcatctatgacataccgcacaaaatgataacatactagagaaactttattgcacaaaaggaaatttatccataaggcaaaggaacatcttaaggctttggatatacatttaccaacaagcattgtttgtattacccctaaagcgcaagacatgtcatccatgagtcatagtgtgtatatctcaacattgcaaagctaccttttttctattatacttttcgcattataggctagatattatctatacatgtcaacaaactctatccctacgtcatatctgaagattcttttcttcactatataagttggcttccctgtcattgaactcacatcaaccagcccaagtttccaataacatcctcaaatagctggatcctaaaccatgcgcgtgctgctcgtggccctggccctgctggctcttgctgccagcgccacctctgcccagagcgagccggagctgaagctggagagcgtggtgatcgtgagcaggcacggcgtgagggccccgaccaagttcacccagctgatgcaggacgtgaccccggacgcgttctacacctggccggtgaagctgggcgagctgaccccgaggggcggcgagctgatcgcctacctgggccactactggaggcagaggctggtggccgacggcctgctgccgaagaagggctgcccgcagagcggccaggtggccatcatcgccgacgtggacgagaggaccaggaagaccggtgaggccttcgccgccggcctggccccggactgcgccatcaccgtgcacacccaggccgacaccagcagcccggacccgctgttcaacccgctgaagaccggcgtgtgccagctggacgtggcccaggtgaccgacgccatcctggagagggccggcggcagcatcgccgacttcaccggccactaccagaccgccttcagggagctggagagggtgctgaacttcccgcagagcaacctggccctgaagagggagaagcaggacgagagcgccagcctgacccaggccctgccgagcgagctgaaggtgagcgccgacaacgtgagcctgaccggcgcctggagcctggccagcatgctgaccgagattttcctgctgcagcaggcccagggcatgccggagccgggctggggcaggatcaccgacagccaccagtggaacaccctgctgagcctgcacaacgcccagttcgacctgctgcagaggaccccggaggtggccaggagcagggccaccccgctgctggacctgatcaagaccgccctgaccccgcacccgccgcagaagcaggcctacggcgtgaccctgccgaccagcgtgctgttcatcgccggccacgacaccaacctggccaacctgggcggcgccctcgagctgcagtggaccctgccgggccagccggacaacaccccgccgggcggcgagctggtgttcgagaggtggaggaggctgagcgacaacagccagtggattcaggtgagcctggtgttccagaccctgcagcagatgagggacaagaccccgctgttcctgaacaccccgccgggcgaggtgaagctgaccctggccggctgcgaggagaggaacgcccagggcatgtgcagcctggccggcttcacccagatcgtgaacgaggccaggattccggcctgcagcctgagcgagaaggacgagctgtgacctaggtccccgaatttccccgatcgttcaaacatttggcaataaagtttcttaagattgaatcctgttgccggtcttgcgatgattatcatataatttctgttgaattacgttaagcatgtaataattaacatgtaatgcatgacgttatttatgagatgggtttttatgattagagtcccgcaattatacatttaatacgcgatagaaaacaaaatatagcgcgcaaactaggataaattatcgcgcgcggtgtcatctatgttactagatcgggaattg

SEQ ID NO: 76 - DNA, 3079 bp, Artificial Sequence
  Synthetic construct, pAG4294
tacagggttccttgcgtgaagaagggtggcctgcggttcaccattaacggtcacgactacttccagctagtactggtgaccaacgtcgcggcggcagggtcaatcaagtccatggaggttatgggttccaacacagcggattggatgccgatggcacgtaactggggcgcccaatggcactcactggcctacctcaccggtcaaggtctatcctttagggtcaccaacacagatgaccaaacgctcgtcttcaccaacgtcgtgccaccaggatggaagtttggccagacatttgcaagcaagctgcagttcaagtgagaggagaagcctgaattgataccggagcgtttcttttgggagtaacatctctggttgcctagcaaacatatgattgtatataagtttcgttgtgcgtttattctttcggtgtgtaaaataacatacatgctttcctgatattttcttgtatatatgtacacacacacgacaaatccttccatttctattattattgaacaatttaattgcgagggcgagtacttgtctgtttaccttttttttttcagatggcattttatagtttaacctttcatggaccggcagtagttctaaccatgaatgaaaagaaatcatagtccacaccacgcagggacattgtggtcattttagacaagacgatttgattaatgtcttgtatgatatggtcgacagtgaggactaacaaacatatggcatattttattaccggcgagttaaataaatttatgtcacagtaataaactgcctaataaatgcacgccagaaaatataatgataaaaaaaagaaaagatacataagtccattgcttctacttttttaaaaattaaatccaacattttctattttttggtataaacttggaagtactagttggatatgcaaaatcatctaacctccatatatttcatcaatttgtttactttacatatgggagaggatagtatgtcaaagaaaatgacaacaagcttacaagtttcttattttaaaagttccgctaacttatcaagcatagtgtgccacgcaaaactgacaacaaaccaacaaatttaaggagcgcctaacttatcatctatgacataccgcacaaaatgataacatactagagaaactttattgcacaaaaggaaatttatccataaggcaaaggaacatcttaaggctttggatatacatttaccaacaagcattgtttgtattacccctaaagcgcaagacatgtcatccatgagtcatagtgtgtatatctcaacattgcaaagctaccttttttctattatacttttcgcattataggctagatattatctatacatgtcaacaaactctatccctacgtcatatctgaagattcttttcttcactatataagttggcttccctgtcattgaactcacatcaaccagcccaagtttccaataacatcctcaaatagctggatccaccatgagggtgttgctcgttgccctcgctctcctggctctcgctgcgagcgccaccagcgctgcgcagtccgagccggagctgaagctggagtccgtggtgatcgtgtcgcgccacggggtgcgcgccccgaccaagttcacgcagctcatgcaggacgtgaccccggacgccttctacacctggccggtgaagctcggcgagctgaccccgcgcggcggcgagctgatcgcctacctcggccactactggcgccagcgcctcgtggccgacggcctcctcccgaagaagggctgcccgcagtccggccaggtggcgatcatcgccgacgtggacgagcgcacccgcaagacgggcgaggccttcgccgccggcctcgccccggactgcgccatcaccgtgcacacccaggccgacacctcctccccggacccgctcttcaacccgctcaagaccggcgtgtgccagctcgacgtggcccaggtgaccgacgccatcctggagcgcgccggcggctccatcgccgacttcaccggccactaccagaccgccttccgcgagctggagcgcgtgctcaacttcccgcagtcgaacctcgccctcaagcgcgagaagcaggacgagtccgcctccctcacccaggccctcccgtccgagctgaaggtgtccgccgacaacgtgtccctcaccggcgcctggtccctcgcctccatgctcaccgaaatcttcctcctccagcaggcccagggcatgccggagccgggctggggccgcatcaccgactcccaccagtggaacaccctcctctccctccacaacgcccagttcgacctcctccagcgcaccccggaggtggcccgctcccgcgccaccccgctcctcgacctcatcaagaccgccctcaccccgcacccgccgcagaagcaggcctacggcgtgaccctcccgacctcggtgctcttcatcgccggccacgacaccaacctcgccaacctcggcggcgccctggagctgcagtggaccctcccgggccagccggacaacaccccgccgggcggcgagctggtgttcgagcgctggcgccgcctctccgacaactcccagtggattcaggtgtccctcgtgttccagaccctccagcagatgcgcgacaagaccccgctcttcctcaacaccccgccgggcgaggtgaagctcaccctggccggctgcgaggagcgcaacgcgcagggcatgtgctccctcgccggcttcacccagatcgtgaacgaggcccgcatcccggcctgctccctctccgagaaggacgagctgtaacctaggtccccgaatttccccgatcgttcaaacatttggcaataaagtttcttaagattgaatcctgttgccggtcttgcgatgattatcatataatttctgttgaattacgttaagcatgtaataattaacatgtaatgcatgacgttatttatgagatgggtttttatgattagagtcccgcaattatacatttaatacgcgatagaaaacaaaatatagcgcgcaaactaggataaattatcgcgcgcggtgtcatctatgttactagatcgggaattg

SEQ ID NO: 77 - DNA, 3079 bp, Artificial Sequence
  Synthetic construct, pAG4269
tacagggttccttgcgtgaagaagggtggcctgcggttcaccattaacggtcacgactacttccagctagtactggtgaccaacgtcgcggcggcagggtcaatcaagtccatggaggttatgggttccaacacagcggattggatgccgatggcacgtaactggggcgcccaatggcactcactggcctacctcaccggtcaaggtctatcctttagggtcaccaacacagatgaccaaacgctcgtcttcaccaacgtcgtgccaccaggatggaagtttggccagacatttgcaagcaagctgcagttcaagtgagaggagaagcctgaattgataccggagcgtttcttttgggagtaacatctctggttgcctagcaaacatatgattgtatataagtttcgttgtgcgtttattctttcggtgtgtaaaataacatacatgctttcctgatattttcttgtatatatgtacacacacacgacaaatccttccatttctattattattgaacaatttaattgcgagggcgagtacttgtctgtttaccttttttttttcagatggcattttatagtttaacctttcatggaccggcagtagttctaaccatgaatgaaaagaaatcatagtccacaccacgcagggacattgtggtcattttagacaagacgatttgattaatgtcttgtatgatatggtcgacagtgaggactaacaaacatatggcatattttattaccggcgagttaaataaatttatgtcacagtaataaactgcctaataaatgcacgccagaaaatataatgataaaaaaaagaaaagatacataagtccattgcttctacttttttaaaaattaaatccaacattttctattttttggtataaacttggaagtactagttggatatgcaaaatcatctaacctccatatatttcatcaatttgtttactttacatatgggagaggatagtatgtcaaagaaaatgacaacaagcttacaagtttcttattttaaaagttccgctaacttatcaagcatagtgtgccacgcaaaactgacaacaaaccaacaaatttaaggagcgcctaacttatcatctatgacataccgcacaaaatgataacatactagagaaactttattgcacaaaaggaaatttatccataaggcaaaggaacatcttaaggctttggatatacatttaccaacaagcattgtttgtattacccctaaagcgcaagacatgtcatccatgagtcatagtgtgtatatctcaacattgcaaagctaccttttttctattatacttttcgcattataggctagatattatctatacatgtcaacaaactctatccctacgtcatatctgaagattcttttcttcactatataagttggcttccctgtcattgaactcacatcaaccagcccaagtttccaataacatcctcaaatagctggatcctaaaccatgcgcgtgctgctcgtggccctggccctgctggctcttgctgccagcgccacctctgcccagagcgagccggagctgaagctggagagcgtggtgatcgtgagcaggcacggcgtgagggccccgaccaaggccacccagctgatgcaggacgtgaccccggacgcgttctacacctggccggtgaagctgggcgagctgaccccgaggggcggcgagctgatcgcctacctgggccactactggaggcagaggctggtggccgacggcctgctgccgaagaagggctgcccgcagagcggccaggtggccatcatcgccgacgtggacgagaggaccaggaagaccggcgaggccttcgccgccggcctggccccggactgcgccatcaccgtgcacacccaggccgacaccagcagcccggacccgctgttcaacccgctgaagaccggcgtgtgccagctggacaacgcccaggtgaccgacgccatcctggagagggccggcggcagcatcgccgacttcaccggccactaccagaccgccttcagggagctggagagggtgctgaacttcccgcagagcaacctgtgcctgaagagggagaagcaggacgagagctgcagcctgacccaggccctgccgagcgagctgaaggtgagcgccgacaacgtgagcctgaccggcgccgtgagcctggccagcatgctgaccgagattttcctgctgcagcaggcccagggcatgccggagccgggctggggcaggatcaccgacagccaccagtggaacaccctgctgagcctgcacaacgcccagttcgacctgctgcagaggaccccggaggtggccaggagcagggccaccccgctgctggacctgatcaagaccgccctgaccccgcacccgccgcagaagcaggcctacggcgtgaccctgccgaccagcgtgctgttcatcgccggccacgacaccaacctggccaacctgggcggcgccctcgagctgcagtggaccctgccgggccagccggacaacaccccgccgggcggcgagctggtgttcgagaggtggaggaggctgagcgacaacagccagtggattcaggtgagcctggtgttccagaccctgcagcagatgagggacaagaccccgctgtccctgaacaccccgccgggcgaggtgaagctgaccctggccggctgcgaggagaggaacgcccagggcatgtgcagcctggccggcttcacccagatcgtgaacgaggccaggattccggcctgcagcctgagcgagaaggacgagctgtgacctaggtccccgaatttccccgatcgttcaaacatttggcaataaagtttcttaagattgaatcctgttgccggtcttgcgatgattatcatataatttctgttgaattacgttaagcatgtaataattaacatgtaatgcatgacgttatttatgagatgggtttttatgattagagtcccgcaattatacatttaatacgcgatagaaaacaaaatatagcgcgcaaactaggataaattatcgcgcgcggtgtcatctatgttactagatcgggaattg

SEQ ID NO: 78 - DNA, 3079 bp, Artificial Sequence
  Synthetic construct, pAG4267
tacagggttccttgcgtgaagaagggtggcctgcggttcaccattaacggtcacgactacttccagctagtactggtgaccaacgtcgcggcggcagggtcaatcaagtccatggaggttatgggttccaacacagcggattggatgccgatggcacgtaactggggcgcccaatggcactcactggcctacctcaccggtcaaggtctatcctttagggtcaccaacacagatgaccaaacgctcgtcttcaccaacgtcgtgccaccaggatggaagtttggccagacatttgcaagcaagctgcagttcaagtgagaggagaagcctgaattgataccggagcgtttcttttgggagtaacatctctggttgcctagcaaacatatgattgtatataagtttcgttgtgcgtttattctttcggtgtgtaaaataacatacatgctttcctgatattttcttgtatatatgtacacacacacgacaaatccttccatttctattattattgaacaatttaattgcgagggcgagtacttgtctgtttaccttttttttttcagatggcattttatagtttaacctttcatggaccggcagtagttctaaccatgaatgaaaagaaatcatagtccacaccacgcagggacattgtggtcattttagacaagacgatttgattaatgtcttgtatgatatggtcgacagtgaggactaacaaacatatggcatattttattaccggcgagttaaataaatttatgtcacagtaataaactgcctaataaatgcacgccagaaaatataatgataaaaaaaagaaaagatacataagtccattgcttctacttttttaaaaattaaatccaacattttctattttttggtataaacttggaagtactagttggatatgcaaaatcatctaacctccatatatttcatcaatttgtttactttacatatgggagaggatagtatgtcaaagaaaatgacaacaagcttacaagtttcttattttaaaagttccgctaacttatcaagcatagtgtgccacgcaaaactgacaacaaaccaacaaatttaaggagcgcctaacttatcatctatgacataccgcacaaaatgataacatactagagaaactttattgcacaaaaggaaatttatccataaggcaaaggaacatcttaaggctttggatatacatttaccaacaagcattgtttgtattacccctaaagcgcaagacatgtcatccatgagtcatagtgtgtatatctcaacattgcaaagctaccttttttctattatacttttcgcattataggctagatattatctatacatgtcaacaaactctatccctacgtcatatctgaagattcttttcttcactatataagttggcttccctgtcattgaactcacatcaaccagcccaagtttccaataacatcctcaaatagctggatccaccatgagggtgttgctcgttgccctcgctctcctggctctcgctgcgagcgccaccagcgctgcgcagtccgagccggagctgaagctggagtccgtggtgatcgtgtcgcgccacggggtgcgcgccccgaccaaggccacgcagctcatgcaggacgtgaccccggacgcctggccgacctggccggtgaagctcggcgagctgaccccgcgcggcggcgagctgatcgcctacctcggccactactggcgccagcgcctcgtggccgacggcctcctcccgaagtgcggctgcccgcagtccggccaggtggcgatcatcgccgacgtggacgagcgcacccgcaagacgggcgaggccttcgccgccggcctcgccccggactgcgccatcaccgtgcacacccaggccgacacctcctccccggacccgctcttcaacccgctcaagaccggcgtgtgccagctcgacaacgccaacgtgaccgacgccatcctggagcgcgccggcggctccatcgccgacttcaccggccactaccagaccgccttccgcgagctggagcgcgtgctcaacttcccgcagtcgaacctctgcctcaagcgcgagaagcaggacgagtcctgctccctcacccaggccctcccgtccgagctgaaggtgtccgccgactgcgtgtccctcaccggcgccgtgtccctcgcctccatgctcaccgaaatcttcctcctccagcaggcccagggcatgccggagccgggctggggccgcatcaccgactcccaccagtggaacaccctcctctccctccacaacgcccagttcgacctcctccagcgcaccccggaggtggcccgctcccgcgccaccccgctcctcgacctcatcaagaccgccctcaccccgcacccgccgcagaagcaggcctacggcgtgaccctcccgacctcggtgctcttcatcgccggccacgacaccaacctcgccaacctcggcggcgccctggagctgaactggaccctcccgggccagccggacaacaccccgccgggcggcgagctggtgttcgagcgctggcgccgcctctccgacaactcccagtggattcaggtgtccctcgtgttccagaccctccagcagatgcgcgacaagaccccgctctccctcaacaccccgccgggcgaggtgaagctcaccctggccggctgcgaggagcgcaacgcgcagggcatgtgctccctcgccggcttcacccagatcgtgaacgaggcccgcatcccggcctgctccctctccgagaaggacgagctgtaacctaggtccccgaatttccccgatcgttcaaacatttggcaataaagtttcttaagattgaatcctgttgccggtcttgcgatgattatcatataatttctgttgaattacgttaagcatgtaataattaacatgtaatgcatgacgttatttatgagatgggtttttatgattagagtcccgcaattatacatttaatacgcgatagaaaacaaaatatagcgcgcaaactaggataaattatcgcgcgcggtgtcatctatgttactagatcgggaattg

SEQ ID NO: 79 - DNA, 3073 bp, Artificial Sequence
  Synthetic construct, pAG4293
tacagggttccttgcgtgaagaagggtggcctgcggttcaccattaacggtcacgactacttccagctagtactggtgaccaacgtcgcggcggcagggtcaatcaagtccatggaggttatgggttccaacacagcggattggatgccgatggcacgtaactggggcgcccaatggcactcactggcctacctcaccggtcaaggtctatcctttagggtcaccaacacagatgaccaaacgctcgtcttcaccaacgtcgtgccaccaggatggaagtttggccagacatttgcaagcaagctgcagttcaagtgagaggagaagcctgaattgataccggagcgtttcttttgggagtaacatctctggttgcctagcaaacatatgattgtatataagtttcgttgtgcgtttattctttcggtgtgtaaaataacatacatgctttcctgatattttcttgtatatatgtacacacacacgacaaatccttccatttctattattattgaacaatttaattgcgagggcgagtacttgtctgtttaccttttttttttcagatggcattttatagtttaacctttcatggaccggcagtagttctaaccatgaatgaaaagaaatcatagtccacaccacgcagggacattgtggtcattttagacaagacgatttgattaatgtcttgtatgatatggtcgacagtgaggactaacaaacatatggcatattttattaccggcgagttaaataaatttatgtcacagtaataaactgcctaataaatgcacgccagaaaatataatgataaaaaaaagaaaagatacataagtccattgcttctacttttttaaaaattaaatccaacattttctattttttggtataaacttggaagtactagttggatatgcaaaatcatctaacctccatatatttcatcaatttgtttactttacatatgggagaggatagtatgtcaaagaaaatgacaacaagcttacaagtttcttattttaaaagttccgctaacttatcaagcatagtgtgccacgcaaaactgacaacaaaccaacaaatttaaggagcgcctaacttatcatctatgacataccgcacaaaatgataacatactagagaaactttattgcacaaaaggaaatttatccataaggcaaaggaacatcttaaggctttggatatacatttaccaacaagcattgtttgtattacccctaaagcgcaagacatgtcatccatgagtcatagtgtgtatatctcaacattgcaaagctaccttttttctattatacttttcgcattataggctagatattatctatacatgtcaacaaactctatccctacgtcatatctgaagattcttttcttcactatataagttggcttccctgtcattgaactcacatcaaccagcccaagtttccaataacatcctcaaatagctggatccaccatgagggtgttgctcgttgccctcgctctcctggctctcgctgcgagcgccaccagccagtcggagcctgagctgaagctggagtcggtcgtcatcgtttcccggcacggcgttagggccccaaccaagttcacacagctgatgcaggacgtgacccccgatgcttggccaacctggcctgtcaagctcggcgagctgacccccaggggcggggagctcatcgcgtacctggggcactactggcgccagcggctggtcgctgacggcctcctgccaaaggttggctgccctcagtctgggcaggtggctatcattgccgacgtcgatgagcgcaccaggaagacgggcgaggccttcgccgcggggctcgccccagactgcgctatcaccgtgcaccatcaggcggacacgtccagcccagatcctctcttcaacccgctgaagaccggcgtctgccagctggacgtggcgaatgtccgcagggctatcctggagagggccggcgggtccattgccgatttcacaaggcattaccagactgcgttcagggagctggagcgggtgctgaacttcccgcagagcaatctctgcctgaagcgcgagaagcaggacgagtcgtgctctctcacgcaggccctgccctctgagctcaaggtctcagcggacgatgtttccctgacaggcgcctggtcactggcgtccatgctcactgagattttcctcctgcagcaggctcaggggatgccggagccaggctgggggcggattacagacagccaccagtggaacactctcctgtcgctccataatgcggttttcgatctcctgcagaggacccccgaggtggctcggtcgcgcgccacgcccctcctggacctgatcaagacagctctcactccacacccgccccagaagcaggcctacggcgttaccctgcctacgtccgtgctcttcattgccggccatgataccaacctcgctaatctgggcggggccctggagctgaactggaccctgccgggccagcccgacaattacccacctggcggggagctggtgttcgagaggtggaggcgcctcagcgataactcgcagtggattcaggtgtccctcgtgttccagacactccagcagatgcgggacaagacaccgctctcactgaacactccgcccggcgaggtcaagctcacgctggccgggtgcgaggagaggaacgctcagggcatgtgctccctggctgggttcacacagattgtcaacgaggcccgcatccccgcttgctctctctccgagaaggacgagctgtaacctaggtccccgaatttccccgatcgttcaaacatttggcaataaagtttcttaagattgaatcctgttgccggtcttgcgatgattatcatataatttctgttgaattacgttaagcatgtaataattaacatgtaatgcatgacgttatttatgagatgggtttttatgattagagtcccgcaattatacatttaatacgcgatagaaaacaaaatatagcgcgcaaactaggataaattatcgcgcgcggtgtcatctatgttactagatcgggaattg

SEQ ID NO: 80 - DNA, 3082 bp, Artificial Sequence
  Synthetic construct, pAG4891
tacagggttccttgcgtgaagaagggtggcctgcggttcaccattaacggtcacgactacttccagctagtactggtgaccaacgtcgcggcggcagggtcaatcaagtccatggaggttatgggttccaacacagcggattggatgccgatggcacgtaactggggcgcccaatggcactcactggcctacctcaccggtcaaggtctatcctttagggtcaccaacacagatgaccaaacgctcgtcttcaccaacgtcgtgccaccaggatggaagtttggccagacatttgcaagcaagctgcagttcaagtgagaggagaagcctgaattgataccggagcgtttcttttgggagtaacatctctggttgcctagcaaacatatgattgtatataagtttcgttgtgcgtttattctttcggtgtgtaaaataacatacatgctttcctgatattttcttgtatatatgtacacacacacgacaaatccttccatttctattattattgaacaatttaattgcgagggcgagtacttgtctgtttaccttttttttttcagatggcattttatagtttaacctttcatggaccggcagtagttctaaccatgaatgaaaagaaatcatagtccacaccacgcagggacattgtggtcattttagacaagacgatttgattaatgtcttgtatgatatggtcgacagtgaggactaacaaacatatggcatattttattaccggcgagttaaataaatttatgtcacagtaataaactgcctaataaatgcacgccagaaaatataatgataaaaaaaagaaaagatacataagtccattgcttctacttttttaaaaattaaatccaacattttctattttttggtataaacttggaagtactagttggatatgcaaaatcatctaacctccatatatttcatcaatttgtttactttacatatgggagaggatagtatgtcaaagaaaatgacaacaagcttacaagtttcttattttaaaagttccgctaacttatcaagcatagtgtgccacgcaaaactgacaacaaaccaacaaatttaaggagcgcctaacttatcatctatgacataccgcacaaaatgataacatactagagaaactttattgcacaaaaggaaatttatccataaggcaaaggaacatcttaaggctttggatatacatttaccaacaagcattgtttgtattacccctaaagcgcaagacatgtcatccatgagtcatagtgtgtatatctcaacattgcaaagctaccttttttctattatacttttcgcattataggctagatattatctatacatgtcaacaaactctatccctacgtcatatctgaagattcttttcttcactatataagttggcttccctgtcattgaactcacatcaaccagcccaagtttccaataacatcctcaaatagctatggccaccatcgctttctcccgcttgtccatctacttctgcgtgcttctcctgtgccacggctccatggccgcccagagcgagccggagctgaagctggagagcgtggtgatcgtgagcaggcacggcgtgagggccccgaccaagttcacccagctgatgcaggacgtgaccccggacgcgttctacacctggccggtgaagctgggcgagctgaccccgaggggcggcgagctgatcgcctacctgggccactactggaggcagaggctggtggccgacggcctgctgccgaagaagggctgcccgcagagcggccaggtggccatcatcgccgacgtggacgagaggaccaggaagaccggtgaggccttcgccgccggcctggccccggactgcgccatcaccgtgcacacccaggccgacaccagcagcccggacccgctgttcaacccgctgaagaccggcgtgtgccagctggacgtggcccaggtgaccgacgccatcctggagagggccggcggcagcatcgccgacttcaccggccactaccagaccgccttcagggagctggagagggtgctgaacttcccgcagagcaacctggccctgaagagggagaagcaggacgagagcgccagcctgacccaggccctgccgagcgagctgaaggtgagcgccgacaacgtgagcctgaccggcgcctggagcctggccagcatgctgaccgagattttcctgctgcagcaggcccagggcatgccggagccgggctggggcaggatcaccgacagccaccagtggaacaccctgctgagcctgcacaacgcccagttcgacctgctgcagaggaccccggaggtggccaggagcagggccaccccgctgctggacctgatcaagaccgccctgaccccgcacccgccgcagaagcaggcctacggcgtgaccctgccgaccagcgtgctgttcatcgccggccacgacaccaacctggccaacctgggcggcgccctcgagctgcagtggaccctgccgggccagccggacaacaccccgccgggcggcgagctggtgttcgagaggtggaggaggctgagcgacaacagccagtggattcaggtgagcctggtgttccagaccctgcagcagatgagggacaagaccccgctgttcctgaacaccccgccgggcgaggtgaagctgaccctggccggctgcgaggagaggaacgcccagggcatgtgcagcctggccggcttcacccagatcgtgaacgaggccaggattccggcctgcagcctgagcgagaaggacgagctgtgacctaggtccccgaatttccccgatcgttcaaacatttggcaataaagtttcttaagattgaatcctgttgccggtcttgcgatgattatcatataatttctgttgaattacgttaagcatgtaataattaacatgtaatgcatgacgttatttatgagatgggtttttatgattagagtcccgcaattatacatttaatacgcgatagaaaacaaaatatagcgcgcaaactaggataaattatcgcgcgcggtgtcatctatgttactagatcgggaattg

SEQ ID NO: 81 - DNA, 3091 bp, Artificial Sequence
  Synthetic construct, pAG4270
tacagggttccttgcgtgaagaagggtggcctgcggttcaccattaacggtcacgactacttccagctagtactggtgaccaacgtcgcggcggcagggtcaatcaagtccatggaggttatgggttccaacacagcggattggatgccgatggcacgtaactggggcgcccaatggcactcactggcctacctcaccggtcaaggtctatcctttagggtcaccaacacagatgaccaaacgctcgtcttcaccaacgtcgtgccaccaggatggaagtttggccagacatttgcaagcaagctgcagttcaagtgagaggagaagcctgaattgataccggagcgtttcttttgggagtaacatctctggttgcctagcaaacatatgattgtatataagtttcgttgtgcgtttattctttcggtgtgtaaaataacatacatgctttcctgatattttcttgtatatatgtacacacacacgacaaatccttccatttctattattattgaacaatttaattgcgagggcgagtacttgtctgtttaccttttttttttcagatggcattttatagtttaacctttcatggaccggcagtagttctaaccatgaatgaaaagaaatcatagtccacaccacgcagggacattgtggtcattttagacaagacgatttgattaatgtcttgtatgatatggtcgacagtgaggactaacaaacatatggcatattttattaccggcgagttaaataaatttatgtcacagtaataaactgcctaataaatgcacgccagaaaatataatgataaaaaaaagaaaagatacataagtccattgcttctacttttttaaaaattaaatccaacattttctattttttggtataaacttggaagtactagttggatatgcaaaatcatctaacctccatatatttcatcaatttgtttactttacatatgggagaggatagtatgtcaaagaaaatgacaacaagcttacaagtttcttattttaaaagttccgctaacttatcaagcatagtgtgccacgcaaaactgacaacaaaccaacaaatttaaggagcgcctaacttatcatctatgacataccgcacaaaatgataacatactagagaaactttattgcacaaaaggaaatttatccataaggcaaaggaacatcttaaggctttggatatacatttaccaacaagcattgtttgtattacccctaaagcgcaagacatgtcatccatgagtcatagtgtgtatatctcaacattgcaaagctaccttttttctattatacttttcgcattataggctagatattatctatacatgtcaacaaactctatccctacgtcatatctgaagattcttttcttcactatataagttggcttccctgtcattgaactcacatcaaccagcccaagtttccaataacatcctcaaatagctatggccaccatcgctttctcccgcttgtccatctacttctgcgtgcttctcctgtgccacggctccatggcccagctcgctgcgcagtccgagccggagctgaagctggagtccgtggtgatcgtgtcgcgccacggggtgcgcgccccgaccaaggccacgcagctcatgcaggacgtgaccccggacgcctggccgacctggccggtgaagctcggcgagctgaccccgcgcggcggcgagctgatcgcctacctcggccactactggcgccagcgcctcgtggccgacggcctcctcccgaagtgcggctgcccgcagtccggccaggtggcgatcatcgccgacgtggacgagcgcacccgcaagacgggcgaggccttcgccgccggcctcgccccggactgcgccatcaccgtgcacacccaggccgacacctcctccccggacccgctcttcaacccgctcaagaccggcgtgtgccagctcgacaacgccaacgtgaccgacgccatcctggagcgcgccggcggctccatcgccgacttcaccggccactaccagaccgccttccgcgagctggagcgcgtgctcaacttcccgcagtcgaacctctgcctcaagcgcgagaagcaggacgagtcctgctccctcacccaggccctcccgtccgagctgaaggtgtccgccgactgcgtgtccctcaccggcgccgtgtccctcgcctccatgctcaccgaaatcttcctcctccagcaggcccagggcatgccggagccgggctggggccgcatcaccgactcccaccagtggaacaccctcctctccctccacaacgcccagttcgacctcctccagcgcaccccggaggtggcccgctcccgcgccaccccgctcctcgacctcatcaagaccgccctcaccccgcacccgccgcagaagcaggcctacggcgtgaccctcccgacctcggtgctcttcatcgccggccacgacaccaacctcgccaacctcggcggcgccctggagctgaactggaccctcccgggccagccggacaacaccccgccgggcggcgagctggtgttcgagcgctggcgccgcctctccgacaactcccagtggattcaggtgtccctcgtgttccagaccctccagcagatgcgcgacaagaccccgctctccctcaacaccccgccgggcgaggtgaagctcaccctggccggctgcgaggagcgcaacgcgcagggcatgtgctccctcgccggcttcacccagatcgtgaacgaggcccgcatcccggcctgctccctctccgagaaggacgagctgtaacctaggtccccgaatttccccgatcgttcaaacatttggcaataaagtttcttaagattgaatcctgttgccggtcttgcgatgattatcatataatttctgttgaattacgttaagcatgtaataattaacatgtaatgcatgacgttatttatgagatgggtttttatgattagagtcccgcaattatacatttaatacgcgatagaaaacaaaatatagcgcgcaaactaggataaattatcgcgcgcggtgtcatctatgttactagatcgggaattg

SEQ ID NO: 82 - DNA, 7305 bp, Artificial Sequence
  Synthetic construct, pAG4815
tccatgctgtcctactacttgcttcatccccttctacattttgttctggtttttggcctgcatttcggatcatgatgtatgtgatttccaatctgctgcaatatgaatggagactctgtgctaaccatcaacaacatgaaatgcttatgaggcctttgctgagcagccaatcttgcctgtgtttatgtcttcacaggccgaattcctctgttttgtttttcaccctcaatatttggaaacatttatctaggttgtttgtgtccaggcctataaatcatacatgatgttgtcgtattggatgtgaatgtggtggcgtgttcagtgccttggatttgagtttgatgagagttgcttctgggtcaccactcaccattatcgatgctcctcttcagcataaggtaaaagtcttccctgtttacgttattttacccactatggttgcttgggttggttttttcctgattgcttatgccatggaaagtcatttgatatgttgaacttgaattaactgtagaattgtatacatgttccatttgtgttgtacttccttcttttctattagtagcctcagatgagtgtgaaaaaaacagattatataacttgccctataaatcatttgaaaaaaatattgtacagtgagaaattgatatatagtgaatttttaagagcatgttttcctaaagaagtatatattttctatgtacaaaggccattgaagtaattgtagatacaggataatgtagactttttggacttacactgctacctttaagtaacaatcatgagcaatagtgttgcaatgatatttaggctgcattcgtttactctcttgatttccatgagcacgcttcccaaactgttaaactctgtgttttttgccaaaaaaaaatgcataggaaagttgcttttaaaaaatcatatcaatccattttttaagttatagctaatacttaattaatcatgcgctaataagtcactctgtttttcgtactagagagattgttttgaaccagcactcaagaacacagccttaacccagccaaataatgctacaacctaccagtccacacctcttgtaaagcatttgttgcatggaaaagctaagatgacagcaacctgttcaggaaaacaactgacaaggtcatagggagagggagcttttggaaaggtgccgtgcagttcaaacaattagttagcagtagggtgttggtttttgctcacagcaataagaagttaatcatggtgtaggcaacccaaataaaacaccaaaatatgcacaaggcagtttgttgtattctgtagtacagacaaaactaaaagtaatgaaagaagatgtggtgttagaaaaggaaacaatatcatgagtaatgtgtgggcattatgggaccacgaaataaaaagaacattttgatgagtcgtgtatcctcgatgagcctcaaaagttctctcaccccggataagaaacccttaagcaatgtgcaaagtttgcattctccactgacataatgcaaaataagatatcatcgatgacatagcaactcatgcatcatatcatgcctctctcaacctattcattcctactcatctacataagtatcttcagctaaatgttagaacataaacccataagtcacgtttgatgagtattaggcgtgacacatgacaaatcacagactcaagcaagataaagcaaaatgatgtgtacataaaactccagagctatatgtcatattgcaaaaagaggagagcttataagacaaggcatgactcacaaaaattcatttgcctttcgtgtcaaaaagaggagggctttacattatccatgtcatattgcaaaagaaagagagaaagaacaacacaatgctgcgtcaattatacatatctgtatgtccatcattattcatccacctttcgtgtaccacacttcatatatcatgagtcacttcatgtctggacattaacaaactctatcttaacatttagatgcaagagcctttatctcactataaatgcacgatgatttctcattgtttctcacaaaaagcattcagttcattagtcctacaacaacggatcctaaaccatgcgcgtgctgctcgtggccctggccctgctggctcttgctgccagcgccacctctgcccagagcgagccggagctgaagctggagagcgtggtgatcgtgagcaggcacggcgtgagggccccgaccaagttcacccagctgatgcaggacgtgaccccggacgcgttctacacctggccggtgaagctgggcgagctgaccccgaggggcggcgagctgatcgcctacctgggccactactggaggcagaggctggtggccgacggcctgctgccgaagaagggctgcccgcagagcggccaggtggccatcatcgccgacgtggacgagaggaccaggaagaccggtgaggccttcgccgccggcctggccccggactgcgccatcaccgtgcacacccaggccgacaccagcagcccggacccgctgttcaacccgctgaagaccggcgtgtgccagctggacgtggcccaggtgaccgacgccatcctggagagggccggcggcagcatcgccgacttcaccggccactaccagaccgccttcagggagctggagagggtgctgaacttcccgcagagcaacctggccctgaagagggagaagcaggacgagagcgccagcctgacccaggccctgccgagcgagctgaaggtgagcgccgacaacgtgagcctgaccggcgcctggagcctggccagcatgctgaccgagattttcctgctgcagcaggcccagggcatgccggagccgggctggggcaggatcaccgacagccaccagtggaacaccctgctgagcctgcacaacgcccagttcgacctgctgcagaggaccccggaggtggccaggagcagggccaccccgctgctggacctgatcaagaccgccctgaccccgcacccgccgcagaagcaggcctacggcgtgaccctgccgaccagcgtgctgttcatcgccggccacgacaccaacctggccaacctgggcggcgccctcgagctgcagtggaccctgccgggccagccggacaacaccccgccgggcggcgagctggtgttcgagaggtggaggaggctgagcgacaacagccagtggattcaggtgagcctggtgttccagaccctgcagcagatgagggacaagaccccgctgttcctgaacaccccgccgggcgaggtgaagctgaccctggccggctgcgaggagaggaacgcccagggcatgtgcagcctggccggcttcacccagatcgtgaacgaggccaggattccggcctgcagcctgagcgagaaggacgagctgtgacctaggtccccgaatttccccgatcgttcaaacatttggcaataaagtttcttaagattgaatcctgttgccggtcttgcgatgattatcatataatttctgttgaattacgttaagcatgtaataattaacatgtaatgcatgacgttatttatgagatgggtttttatgattagagtcccgcaattatacatttaatacgcgatagaaaacaaaatatagcgcgcaaactaggataaattatcgcgcgcggtgtcatctatgttactagatcgggaattgggtaccatcaatcccgggataaaattttagtgaagctaaagcggtgaaagattatagaatttgatgtgccagattaataaatcgattaactcctaaagttcaagccgagactacagacacatgagctacataaatgagccaaggactcgagcaaagacaaatcgacacagacattataattcaagtcattctagaagattcatgagaagagtatcatttatttaaatcaatgacttgatcaaataagacctaggagctactattgataatatatatcatgggtatctagatcaagcattatgaagaagagcctaagtagaaggccccatgggctcgaccacaaacccaaggactcgacaataaagtctaggagggatcccatagctaaaaggactctagaagtgtatgtatggtaaagattttatcgagacaagaaatacgataaagatcttaacagaatcggagtcatacttgtaaaaatagagttggactcgtgtacaacttggtcttcgacttagttcggtcatgaattcagtaaccgactagatatgtaccatggaacccctagggcatgaggctatgagccataggatcatcagatccaaacatacaccaacaaatccatcacacaccgaagatccatattaacaagggattagctactttacaatttcagagtaacaaatagagccaaactcatagcacaggggaacttcatatcacaaatggaggcattgaattgatataaaaagctaaagttctaaaaagtttgaagtgctgaaacttcaaagccgctaactagtgaagcaccgaagccttccggggagagaagacatacacgacacgttagggacgtaaaatgacgaaattatacaactacctctatatgtaacacttatgtaatagaaaagacagaatccatatgaagatgtataatggatcaaccatataaatagataaacaatatatctgctatggggattggcattcttgtatccctacgcctgtatatcccctgtttagagaacctccgaaggtatatgatgctgaagattattgttgtcttgtctttcatcatatatcgagtctttccctaggatattattattcgcaatgtgcattacatggttaatcgattgagagaacatgcatctcacctttagctgataaacgataatccatgttttacacttcgtagctactcatgagtttcgatatacaaatttgttttctggactacgtaccattccatcctcttaggagaggagaggaagtgtcctcgatttaattatgttgtcattttgtagttcttcacaaaatctcaacaggtaccaaacacattgtttccacaagacatattttagtcacaacaaatctatattattattaatcactaaaactatactgaggctcagatgcttttactagctcttgctagtatgtgatgtaggtctctttcgacatcattccatcaaaatcatatgattagcccataccaaacatttctataccattcagagaccagaatagtcttttctaatagaaaaaaggaaaatagagtgggccgacgacgacacaaattactgcgtggaccagaaaatagtgagacacggaagacaaaagaagtaaaagaggcaaggactacggcccacatgagattcggccccgccacctccggcaaccagcggccgatccaacggcagtgcatcctcaacggcgcgcgcgcgcgcgcgcgcgcacaacctcgtatatatcgccgcgcggaagcggcgcgaccgaggaagccttgtcctcgacaccccctacacaggtgtcgcgctgcccccgacacgagtcccgcatgcgtcccacgcggccgcgccagatcccgcctccgcgcgttgccacgccctctataaacacccagctctctccctcgccctcatctatcgcactcgtagtcgtagctcaagcatcagcggcaggagctctgggcagcgtgcgcacgtggggtacctagctcgctctgctagcctaccggatcctaaaccatgcgcgtgctgctcgtggccctggccctgctggctcttgctgccagcgccacctctgcccagagcgagccggagctgaagctggagagcgtggtgatcgtgagcaggcacggcgtgagggccccgaccaagttcacccagctgatgcaggacgtgaccccggacgcgttctacacctggccggtgaagctgggcgagctgaccccgaggggcggcgagctgatcgcctacctgggccactactggaggcagaggctggtggccgacggcctgctgccgaagaagggctgcccgcagagcggccaggtggccatcatcgccgacgtggacgagaggaccaggaagaccggtgaggccttcgccgccggcctggccccggactgcgccatcaccgtgcacacccaggccgacaccagcagcccggacccgctgttcaacccgctgaagaccggcgtgtgccagctggacgtggcccaggtgaccgacgccatcctggagagggccggcggcagcatcgccgacttcaccggccactaccagaccgccttcagggagctggagagggtgctgaacttcccgcagagcaacctggccctgaagagggagaagcaggacgagagcgccagcctgacccaggccctgccgagcgagctgaaggtgagcgccgacaacgtgagcctgaccggcgcctggagcctggccagcatgctgaccgagattttcctgctgcagcaggcccagggcatgccggagccgggctggggcaggatcaccgacagccaccagtggaacaccctgctgagcctgcacaacgcccagttcgacctgctgcagaggaccccggaggtggccaggagcagggccaccccgctgctggacctgatcaagaccgccctgaccccgcacccgccgcagaagcaggcctacggcgtgaccctgccgaccagcgtgctgttcatcgccggccacgacaccaacctggccaacctgggcggcgccctcgagctgcagtggaccctgccgggccagccggacaacaccccgccgggcggcgagctggtgttcgagaggtggaggaggctgagcgacaacagccagtggattcaggtgagcctggtgttccagaccctgcagcagatgagggacaagaccccgctgttcctgaacaccccgccgggcgaggtgaagctgaccctggccggctgcgaggagaggaacgcccagggcatgtgcagcctggccggcttcacccagatcgtgaacgaggccaggattccggcctgcagcctggacgagctgaaggccgaggccaagtgacctaggtccccgaatttccccgatcgttcaaacatttggcaataaagtttcttaagattgaatcctgttgccggtcttgcgatgattatcatataatttctgttgaattacgttaagcatgtaataattaacatgtaatgcatgacgttatttatgagatgggtttttatgattagagtcccgcaattatacatttaatacgcgatagaaaacaaaatatagcgcgcaaactaggataaattatcgcgcgcggtgtcatctatgttactagatcgggaattg

SEQ ID NO: 83 - DNA, 5942 bp, Artificial Sequence
  Synthetic construct, pAG4281
aaagtaatcatattattttatgtgtgaatcttctttactttttcatttgattatgattatgaaggtatgaccttcataaccttcgtccgaaatccattatatccaaaggaaaataatgcttcgaaggacgaaggattttgatatttaacattttatgttgccttgttcttaattcatagcatttgagaacaagtccccaacaccaatctttatctttactatattaaagcaccagttcaacgatcgtctcgtgtcaatattattaaaaaactcctacatttctttataatcaacccgcactcttataatctcttctcttactactataataagagagtttatgtacaaaataaggtgaaattatgtataagtgttctggaccttggttgttggctcatattcacacaacctaatcaatagaaaacatatgttttattaaaacaaaatttatcatatatatatatatatatatatatatatatatatatatatataatataaaccgtagcaatgcacaggcatatgactagtggcaacttaataccatgtgtgtattaagatgaataagaggtatccaaataaataacttgttcgcttacgtctggatcgaaaggggttggaaacgattaaatctcttcctagtcaaaattaaatagaaggagatttaatcgatttctcccaatccccttcgatccaggtgcaaccgaataagtccttaaatgttgaggaacacgaaacaaccatgcattggcatgtaaagctccaagaattcgttgtatccttaacaactcacagaacatcaaccaaaattgcacgtcaagggtattgggtaagaaacaatcaaacaaatcctctctgtgtgcaaagaaacacggtgagtcatgccgagatcatactcatctgatatacatgcttacagctcacaagacattacaaacaactcatattgcattacaaagatcgtttcatgaaaaataaaataggccggaacaggacaaaaatccttgacgtgtaaagtaaatttacaacaaaaaaaaagccatatgtcaagctaaatctaattcgttttacgtagatcaacaacctgtagaaggcaacaaaactgagccacgcagaagtacagaatgattccagatgaaccatcgacgtgctacgtaaagagagtgacgagtcatatacatttggcaagaaaccatgaagctgcctacagccgtctcggtggcataagaacacaagaaattgtgttaattaatcaaagctataaataacgctcgcatgcctgtgcacttctccatcaccaccactgggtcttcagaccattagctttatctactccagagcgcagaagaacccgatcgacaccggatcctaaaccatgcgcgtgctgctcgtggccctggccctgctggctcttgctgccagcgccacctctgcccagagcgagccggagctgaagctggagagcgtggtgatcgtgagcaggcacggcgtgagggccccgaccaagttcacccagctgatgcaggacgtgaccccggacgcgttctacacctggccggtgaagctgggcgagctgaccccgaggggcggcgagctgatcgcctacctgggccactactggaggcagaggctggtggccgacggcctgctgccgaagaagggctgcccgcagagcggccaggtggccatcatcgccgacgtggacgagaggaccaggaagaccggtgaggccttcgccgccggcctggccccggactgcgccatcaccgtgcacacccaggccgacaccagcagcccggacccgctgttcaacccgctgaagaccggcgtgtgccagctggacgtggcccaggtgaccgacgccatcctggagagggccggcggcagcatcgccgacttcaccggccactaccagaccgccttcagggagctggagagggtgctgaacttcccgcagagcaacctggccctgaagagggagaagcaggacgagagcgccagcctgacccaggccctgccgagcgagctgaaggtgagcgccgacaacgtgagcctgaccggcgcctggagcctggccagcatgctgaccgagattttcctgctgcagcaggcccagggcatgccggagccgggctggggcaggatcaccgacagccaccagtggaacaccctgctgagcctgcacaacgcccagttcgacctgctgcagaggaccccggaggtggccaggagcagggccaccccgctgctggacctgatcaagaccgccctgaccccgcacccgccgcagaagcaggcctacggcgtgaccctgccgaccagcgtgctgttcatcgccggccacgacaccaacctggccaacctgggcggcgccctcgagctgcagtggaccctgccgggccagccggacaacaccccgccgggcggcgagctggtgttcgagaggtggaggaggctgagcgacaacagccagtggattcaggtgagcctggtgttccagaccctgcagcagatgagggacaagaccccgctgttcctgaacaccccgccgggcgaggtgaagctgaccctggccggctgcgaggagaggaacgcccagggcatgtgcagcctggccggcttcacccagatcgtgaacgaggccaggattccggcctgcagcctgagcgagaaggacgagctgtgacctaggtccccgaatttccccgatcgttcaaacatttggcaataaagtttcttaagattgaatcctgttgccggtcttgcgatgattatcatataatttctgttgaattacgttaagcatgtaataattaacatgtaatgcatgacgttatttatgagatgggtttttatgattagagtcccgcaattatacatttaatacgcgatagaaaacaaaatatagcgcgcaaactaggataaattatcgcgcgcggtgtcatctatgttactagatcgggaattgggtaccaaagtaatcatattattttatgtgtgaatcttctttactttttcatttgattatgattatgaaggtatgaccttcataaccttcgtccgaaatccattatatccaaaggaaaataatgcttcgaaggacgaaggattttgatatttaacattttatgttgccttgttcttaattcatagcatttgagaacaagtccccaacaccaatctttatctttactatattaaagcaccagttcaacgatcgtctcgtgtcaatattattaaaaaactcctacatttctttataatcaacccgcactcttataatctcttctcttactactataataagagagtttatgtacaaaataaggtgaaattatgtataagtgttctggaccttggttgttggctcatattcacacaacctaatcaatagaaaacatatgttttattaaaacaaaatttatcatatatatatatatatatatatatatatatatatatatatataatataaaccgtagcaatgcacaggcatatgactagtggcaacttaataccatgtgtgtattaagatgaataagaggtatccaaataaataacttgttcgcttacgtctggatcgaaaggggttggaaacgattaaatctcttcctagtcaaaattaaatagaaggagatttaatcgatttctcccaatccccttcgatccaggtgcaaccgaataagtccttaaatgttgaggaacacgaaacaaccatgcattggcatgtaaagctccaagaattcgttgtatccttaacaactcacagaacatcaaccaaaattgcacgtcaagggtattgggtaagaaacaatcaaacaaatcctctctgtgtgcaaagaaacacggtgagtcatgccgagatcatactcatctgatatacatgcttacagctcacaagacattacaaacaactcatattgcattacaaagatcgtttcatgaaaaataaaataggccggaacaggacaaaaatccttgacgtgtaaagtaaatttacaacaaaaaaaaagccatatgtcaagctaaatctaattcgttttacgtagatcaacaacctgtagaaggcaacaaaactgagccacgcagaagtacagaatgattccagatgaaccatcgacgtgctacgtaaagagagtgacgagtcatatacatttggcaagaaaccatgaagctgcctacagccgtctcggtggcataagaacacaagaaattgtgttaattaatcaaagctataaataacgctcgcatgcctgtgcacttctccatcaccaccactgggtcttcagaccattagctttatctactccagagcgcagaagaacccgatcgacaccggatcctaaaccatgcgcgtgctgctcgtggccctggccctgctggctcttgctgccagcgccacctctgcccagagcgagccggagctgaagctggagagcgtggtgatcgtgagcaggcacggcgtgagggccccgaccaagttcacccagctgatgcaggacgtgaccccggacgcgttctacacctggccggtgaagctgggcgagctgaccccgaggggcggcgagctgatcgcctacctgggccactactggaggcagaggctggtggccgacggcctgctgccgaagaagggctgcccgcagagcggccaggtggccatcatcgccgacgtggacgagaggaccaggaagaccggtgaggccttcgccgccggcctggccccggactgcgccatcaccgtgcacacccaggccgacaccagcagcccggacccgctgttcaacccgctgaagaccggcgtgtgccagctggacgtggcccaggtgaccgacgccatcctggagagggccggcggcagcatcgccgacttcaccggccactaccagaccgccttcagggagctggagagggtgctgaacttcccgcagagcaacctggccctgaagagggagaagcaggacgagagcgccagcctgacccaggccctgccgagcgagctgaaggtgagcgccgacaacgtgagcctgaccggcgcctggagcctggccagcatgctgaccgagattttcctgctgcagcaggcccagggcatgccggagccgggctggggcaggatcaccgacagccaccagtggaacaccctgctgagcctgcacaacgcccagttcgacctgctgcagaggaccccggaggtggccaggagcagggccaccccgctgctggacctgatcaagaccgccctgaccccgcacccgccgcagaagcaggcctacggcgtgaccctgccgaccagcgtgctgttcatcgccggccacgacaccaacctggccaacctgggcggcgccctcgagctgcagtggaccctgccgggccagccggacaacaccccgccgggcggcgagctggtgttcgagaggtggaggaggctgagcgacaacagccagtggattcaggtgagcctggtgttccagaccctgcagcagatgagggacaagaccccgctgttcctgaacaccccgccgggcgaggtgaagctgaccctggccggctgcgaggagaggaacgcccagggcatgtgcagcctggccggcttcacccagatcgtgaacgaggccaggattccggcctgcagcctgagcgagaaggacgagctgtgacctaggtccccgaatttccccgatcgttcaaacatttggcaataaagtttcttaagattgaatcctgttgccggtcttgcgatgattatcatataatttctgttgaattacgttaagcatgtaataattaacatgtaatgcatgacgttatttatgagatgggtttttatgattagagtcccgcaattatacatttaatacgcgatagaaaacaaaatatagcgcgcaaactaggataaattatcgcgcgcggtgtcatctatgttactagatcgggaattg

SEQ ID NO: 84 - DNA, 6056 bp, Artificial Sequence
  Synthetic construct, pAG4892
aaagtaatcatattattttatgtgtgaatcttctttactttttcatttgattatgattatgaaggtatgaccttcataaccttcgtccgaaatccattatatccaaaggaaaataatgcttcgaaggacgaaggattttgatatttaacattttatgttgccttgttcttaattcatagcatttgagaacaagtccccaacaccaatctttatctttactatattaaagcaccagttcaacgatcgtctcgtgtcaatattattaaaaaactcctacatttctttataatcaacccgcactcttataatctcttctcttactactataataagagagtttatgtacaaaataaggtgaaattatgtataagtgttctggaccttggttgttggctcatattcacacaacctaatcaatagaaaacatatgttttattaaaacaaaatttatcatatatatatatatatatatatatatatatatatatatatataatataaaccgtagcaatgcacaggcatatgactagtggcaacttaataccatgtgtgtattaagatgaataagaggtatccaaataaataacttgttcgcttacgtctggatcgaaaggggttggaaacgattaaatctcttcctagtcaaaattaaatagaaggagatttaatcgatttctcccaatccccttcgatccaggtgcaaccgaataagtccttaaatgttgaggaacacgaaacaaccatgcattggcatgtaaagctccaagaattcgttgtatccttaacaactcacagaacatcaaccaaaattgcacgtcaagggtattgggtaagaaacaatcaaacaaatcctctctgtgtgcaaagaaacacggtgagtcatgccgagatcatactcatctgatatacatgcttacagctcacaagacattacaaacaactcatattgcattacaaagatcgtttcatgaaaaataaaataggccggaacaggacaaaaatccttgacgtgtaaagtaaatttacaacaaaaaaaaagccatatgtcaagctaaatctaattcgttttacgtagatcaacaacctgtagaaggcaacaaaactgagccacgcagaagtacagaatgattccagatgaaccatcgacgtgctacgtaaagagagtgacgagtcatatacatttggcaagaaaccatgaagctgcctacagccgtctcggtggcataagaacacaagaaattgtgttaattaatcaaagctataaataacgctcgcatgcctgtgcacttctccatcaccaccactgggtcttcagaccattagctttatctactccagagcgcagaagaacccgatcgacaccggatcctaaaccatgcgcgtgctgctcgtggccctggccctgctggctcttgctgccagcgccacctctgcccagagcgagccggagctgaagctggagagcgtggtgatcgtgagcaggcacggcgtgagggccccgaccaagttcacccagctgatgcaggacgtgaccccggacgcgttctacacctggccggtgaagctgggcgagctgaccccgaggggcggcgagctgatcgcctacctgggccactactggaggcagaggctggtggccgacggcctgctgccgaagaagggctgcccgcagagcggccaggtggccatcatcgccgacgtggacgagaggaccaggaagaccggtgaggccttcgccgccggcctggccccggactgcgccatcaccgtgcacacccaggccgacaccagcagcccggacccgctgttcaacccgctgaagaccggcgtgtgccagctggacgtggcccaggtgaccgacgccatcctggagagggccggcggcagcatcgccgacttcaccggccactaccagaccgccttcagggagctggagagggtgctgaacttcccgcagagcaacctggccctgaagagggagaagcaggacgagagcgccagcctgacccaggccctgccgagcgagctgaaggtgagcgccgacaacgtgagcctgaccggcgcctggagcctggccagcatgctgaccgagattttcctgctgcagcaggcccagggcatgccggagccgggctggggcaggatcaccgacagccaccagtggaacaccctgctgagcctgcacaacgcccagttcgacctgctgcagaggaccccggaggtggccaggagcagggccaccccgctgctggacctgatcaagaccgccctgaccccgcacccgccgcagaagcaggcctacggcgtgaccctgccgaccagcgtgctgttcatcgccggccacgacaccaacctggccaacctgggcggcgccctcgagctgcagtggaccctgccgggccagccggacaacaccccgccgggcggcgagctggtgttcgagaggtggaggaggctgagcgacaacagccagtggattcaggtgagcctggtgttccagaccctgcagcagatgagggacaagaccccgctgttcctgaacaccccgccgggcgaggtgaagctgaccctggccggctgcgaggagaggaacgcccagggcatgtgcagcctggccggcttcacccagatcgtgaacgaggccaggattccggcctgcagcctgagcgagaaggacgagctgtgacctaggtccccgaatttccccgatcgttcaaacatttggcaataaagtttcttaagattgaatcctgttgccggtcttgcgatgattatcatataatttctgttgaattacgttaagcatgtaataattaacatgtaatgcatgacgttatttatgagatgggtttttatgattagagtcccgcaattatacatttaatacgcgatagaaaacaaaatatagcgcgcaaactaggataaattatcgcgcgcggtgtcatctatgttactagatcgggaattgggtacctacagggttccttgcgtgaagaagggtggcctgcggttcaccattaacggtcacgactacttccagctagtactggtgaccaacgtcgcggcggcagggtcaatcaagtccatggaggttatgggttccaacacagcggattggatgccgatggcacgtaactggggcgcccaatggcactcactggcctacctcaccggtcaaggtctatcctttagggtcaccaacacagatgaccaaacgctcgtcttcaccaacgtcgtgccaccaggatggaagtttggccagacatttgcaagcaagctgcagttcaagtgagaggagaagcctgaattgataccggagcgtttcttttgggagtaacatctctggttgcctagcaaacatatgattgtatataagtttcgttgtgcgtttattctttcggtgtgtaaaataacatacatgctttcctgatattttcttgtatatatgtacacacacacgacaaatccttccatttctattattattgaacaatttaattgcgagggcgagtacttgtctgtttaccttttttttttcagatggcattttatagtttaacctttcatggaccggcagtagttctaaccatgaatgaaaagaaatcatagtccacaccacgcagggacattgtggtcattttagacaagacgatttgattaatgtcttgtatgatatggtcgacagtgaggactaacaaacatatggcatattttattaccggcgagttaaataaatttatgtcacagtaataaactgcctaataaatgcacgccagaaaatataatgataaaaaaaagaaaagatacataagtccattgcttctacttttttaaaaattaaatccaacattttctattttttggtataaacttggaagtactagttggatatgcaaaatcatctaacctccatatatttcatcaatttgtttactttacatatgggagaggatagtatgtcaaagaaaatgacaacaagcttacaagtttcttattttaaaagttccgctaacttatcaagcatagtgtgccacgcaaaactgacaacaaaccaacaaatttaaggagcgcctaacttatcatctatgacataccgcacaaaatgataacatactagagaaactttattgcacaaaaggaaatttatccataaggcaaaggaacatcttaaggctttggatatacatttaccaacaagcattgtttgtattacccctaaagcgcaagacatgtcatccatgagtcatagtgtgtatatctcaacattgcaaagctaccttttttctattatacttttcgcattataggctagatattatctatacatgtcaacaaactctatccctacgtcatatctgaagattcttttcttcactatataagttggcttccctgtcattgaactcacatcaaccagcccaagtttccaataacatcctcaaatagctatggccaccatcgctttctcccgcttgtccatctacttctgcgtgcttctcctgtgccacggctccatggccgcccagagcgagccggagctgaagctggagagcgtggtgatcgtgagcaggcacggcgtgagggccccgaccaagttcacccagctgatgcaggacgtgaccccggacgcgttctacacctggccggtgaagctgggcgagctgaccccgaggggcggcgagctgatcgcctacctgggccactactggaggcagaggctggtggccgacggcctgctgccgaagaagggctgcccgcagagcggccaggtggccatcatcgccgacgtggacgagaggaccaggaagaccggtgaggccttcgccgccggcctggccccggactgcgccatcaccgtgcacacccaggccgacaccagcagcccggacccgctgttcaacccgctgaagaccggcgtgtgccagctggacgtggcccaggtgaccgacgccatcctggagagggccggcggcagcatcgccgacttcaccggccactaccagaccgccttcagggagctggagagggtgctgaacttcccgcagagcaacctggccctgaagagggagaagcaggacgagagcgccagcctgacccaggccctgccgagcgagctgaaggtgagcgccgacaacgtgagcctgaccggcgcctggagcctggccagcatgctgaccgagattttcctgctgcagcaggcccagggcatgccggagccgggctggggcaggatcaccgacagccaccagtggaacaccctgctgagcctgcacaacgcccagttcgacctgctgcagaggaccccggaggtggccaggagcagggccaccccgctgctggacctgatcaagaccgccctgaccccgcacccgccgcagaagcaggcctacggcgtgaccctgccgaccagcgtgctgttcatcgccggccacgacaccaacctggccaacctgggcggcgccctcgagctgcagtggaccctgccgggccagccggacaacaccccgccgggcggcgagctggtgttcgagaggtggaggaggctgagcgacaacagccagtggattcaggtgagcctggtgttccagaccctgcagcagatgagggacaagaccccgctgttcctgaacaccccgccgggcgaggtgaagctgaccctggccggctgcgaggagaggaacgcccagggcatgtgcagcctggccggcttcacccagatcgtgaacgaggccaggattccggcctgcagcctgagcgagaaggacgagctgtgacctaggtccccgaatttccccgatcgttcaaacatttggcaataaagtttcttaagattgaatcctgttgccggtcttgcgatgattatcatataatttctgttgaattacgttaagcatgtaataattaacatgtaatgcatgacgttatttatgagatgggtttttatgattagagtcccgcaattatacatttaatacgcgatagaaaacaaaatatagcgcgcaaactaggataaattatcgcgcgcggtgtcatctatgttactagatcgggaattg

SEQ ID NO: 85 - DNA, 7305 bp, Artificial Sequence
  Synthetic construct, pAG4803
tccatgctgtcctactacttgcttcatccccttctacattttgttctggtttttggcctgcatttcggatcatgatgtatgtgatttccaatctgctgcaatatgaatggagactctgtgctaaccatcaacaacatgaaatgcttatgaggcctttgctgagcagccaatcttgcctgtgtttatgtcttcacaggccgaattcctctgttttgtttttcaccctcaatatttggaaacatttatctaggttgtttgtgtccaggcctataaatcatacatgatgttgtcgtattggatgtgaatgtggtggcgtgttcagtgccttggatttgagtttgatgagagttgcttctgggtcaccactcaccattatcgatgctcctcttcagcataaggtaaaagtcttccctgtttacgttattttacccactatggttgcttgggttggttttttcctgattgcttatgccatggaaagtcatttgatatgttgaacttgaattaactgtagaattgtatacatgttccatttgtgttgtacttccttcttttctattagtagcctcagatgagtgtgaaaaaaacagattatataacttgccctataaatcatttgaaaaaaatattgtacagtgagaaattgatatatagtgaatttttaagagcatgttttcctaaagaagtatatattttctatgtacaaaggccattgaagtaattgtagatacaggataatgtagactttttggacttacactgctacctttaagtaacaatcatgagcaatagtgttgcaatgatatttaggctgcattcgtttactctcttgatttccatgagcacgcttcccaaactgttaaactctgtgttttttgccaaaaaaaaatgcataggaaagttgcttttaaaaaatcatatcaatccattttttaagttatagctaatacttaattaatcatgcgctaataagtcactctgtttttcgtactagagagattgttttgaaccagcactcaagaacacagccttaacccagccaaataatgctacaacctaccagtccacacctcttgtaaagcatttgttgcatggaaaagctaagatgacagcaacctgttcaggaaaacaactgacaaggtcatagggagagggagcttttggaaaggtgccgtgcagttcaaacaattagttagcagtagggtgttggtttttgctcacagcaataagaagttaatcatggtgtaggcaacccaaataaaacaccaaaatatgcacaaggcagtttgttgtattctgtagtacagacaaaactaaaagtaatgaaagaagatgtggtgttagaaaaggaaacaatatcatgagtaatgtgtgggcattatgggaccacgaaataaaaagaacattttgatgagtcgtgtatcctcgatgagcctcaaaagttctctcaccccggataagaaacccttaagcaatgtgcaaagtttgcattctccactgacataatgcaaaataagatatcatcgatgacatagcaactcatgcatcatatcatgcctctctcaacctattcattcctactcatctacataagtatcttcagctaaatgttagaacataaacccataagtcacgtttgatgagtattaggcgtgacacatgacaaatcacagactcaagcaagataaagcaaaatgatgtgtacataaaactccagagctatatgtcatattgcaaaaagaggagagcttataagacaaggcatgactcacaaaaattcatttgcctttcgtgtcaaaaagaggagggctttacattatccatgtcatattgcaaaagaaagagagaaagaacaacacaatgctgcgtcaattatacatatctgtatgtccatcattattcatccacctttcgtgtaccacacttcatatatcatgagtcacttcatgtctggacattaacaaactctatcttaacatttagatgcaagagcctttatctcactataaatgcacgatgatttctcattgtttctcacaaaaagcattcagttcattagtcctacaacaacggatcctaaaccatgcgcgtgctgctcgtggccctggccctgctggctcttgctgccagcgccacctctgcccagagcgagccggagctgaagctggagagcgtggtgatcgtgagcaggcacggcgtgagggccccgaccaagttcacccagctgatgcaggacgtgaccccggacgcgttctacacctggccggtgaagctgggcgagctgaccccgaggggcggcgagctgatcgcctacctgggccactactggaggcagaggctggtggccgacggcctgctgccgaagaagggctgcccgcagagcggccaggtggccatcatcgccgacgtggacgagaggaccaggaagaccggtgaggccttcgccgccggcctggccccggactgcgccatcaccgtgcacacccaggccgacaccagcagcccggacccgctgttcaacccgctgaagaccggcgtgtgccagctggacgtggcccaggtgaccgacgccatcctggagagggccggcggcagcatcgccgacttcaccggccactaccagaccgccttcagggagctggagagggtgctgaacttcccgcagagcaacctggccctgaagagggagaagcaggacgagagcgccagcctgacccaggccctgccgagcgagctgaaggtgagcgccgacaacgtgagcctgaccggcgcctggagcctggccagcatgctgaccgagattttcctgctgcagcaggcccagggcatgccggagccgggctggggcaggatcaccgacagccaccagtggaacaccctgctgagcctgcacaacgcccagttcgacctgctgcagaggaccccggaggtggccaggagcagggccaccccgctgctggacctgatcaagaccgccctgaccccgcacccgccgcagaagcaggcctacggcgtgaccctgccgaccagcgtgctgttcatcgccggccacgacaccaacctggccaacctgggcggcgccctcgagctgcagtggaccctgccgggccagccggacaacaccccgccgggcggcgagctggtgttcgagaggtggaggaggctgagcgacaacagccagtggattcaggtgagcctggtgttccagaccctgcagcagatgagggacaagaccccgctgttcctgaacaccccgccgggcgaggtgaagctgaccctggccggctgcgaggagaggaacgcccagggcatgtgcagcctggccggcttcacccagatcgtgaacgaggccaggattccggcctgcagcctggacgagctgaaggccgaggccaagtgacctaggtccccgaatttccccgatcgttcaaacatttggcaataaagtttcttaagattgaatcctgttgccggtcttgcgatgattatcatataatttctgttgaattacgttaagcatgtaataattaacatgtaatgcatgacgttatttatgagatgggtttttatgattagagtcccgcaattatacatttaatacgcgatagaaaacaaaatatagcgcgcaaactaggataaattatcgcgcgcggtgtcatctatgttactagatcgggaattgggtaccatcaatcccgggataaaattttagtgaagctaaagcggtgaaagattatagaatttgatgtgccagattaataaatcgattaactcctaaagttcaagccgagactacagacacatgagctacataaatgagccaaggactcgagcaaagacaaatcgacacagacattataattcaagtcattctagaagattcatgagaagagtatcatttatttaaatcaatgacttgatcaaataagacctaggagctactattgataatatatatcatgggtatctagatcaagcattatgaagaagagcctaagtagaaggccccatgggctcgaccacaaacccaaggactcgacaataaagtctaggagggatcccatagctaaaaggactctagaagtgtatgtatggtaaagattttatcgagacaagaaatacgataaagatcttaacagaatcggagtcatacttgtaaaaatagagttggactcgtgtacaacttggtcttcgacttagttcggtcatgaattcagtaaccgactagatatgtaccatggaacccctagggcatgaggctatgagccataggatcatcagatccaaacatacaccaacaaatccatcacacaccgaagatccatattaacaagggattagctactttacaatttcagagtaacaaatagagccaaactcatagcacaggggaacttcatatcacaaatggaggcattgaattgatataaaaagctaaagttctaaaaagtttgaagtgctgaaacttcaaagccgctaactagtgaagcaccgaagccttccggggagagaagacatacacgacacgttagggacgtaaaatgacgaaattatacaactacctctatatgtaacacttatgtaatagaaaagacagaatccatatgaagatgtataatggatcaaccatataaatagataaacaatatatctgctatggggattggcattcttgtatccctacgcctgtatatcccctgtttagagaacctccgaaggtatatgatgctgaagattattgttgtcttgtctttcatcatatatcgagtctttccctaggatattattattcgcaatgtgcattacatggttaatcgattgagagaacatgcatctcacctttagctgataaacgataatccatgttttacacttcgtagctactcatgagtttcgatatacaaatttgttttctggactacgtaccattccatcctcttaggagaggagaggaagtgtcctcgatttaattatgttgtcattttgtagttcttcacaaaatctcaacaggtaccaaacacattgtttccacaagacatattttagtcacaacaaatctatattattattaatcactaaaactatactgaggctcagatgcttttactagctcttgctagtatgtgatgtaggtctctttcgacatcattccatcaaaatcatatgattagcccataccaaacatttctataccattcagagaccagaatagtcttttctaatagaaaaaaggaaaatagagtgggccgacgacgacacaaattactgcgtggaccagaaaatagtgagacacggaagacaaaagaagtaaaagaggcaaggactacggcccacatgagattcggccccgccacctccggcaaccagcggccgatccaacggcagtgcatcctcaacggcgcgcgcgcgcgcgcgcgcgcacaacctcgtatatatcgccgcgcggaagcggcgcgaccgaggaagccttgtcctcgacaccccctacacaggtgtcgcgctgcccccgacacgagtcccgcatgcgtcccacgcggccgcgccagatcccgcctccgcgcgttgccacgccctctataaacacccagctctctccctcgccctcatctatcgcactcgtagtcgtagctcaagcatcagcggcaggagctctgggcagcgtgcgcacgtggggtacctagctcgctctgctagcctaccggatcctaaaccatgcgcgtgctgctcgtggccctggccctgctggctcttgctgccagcgccacctctgcccagagcgagccggagctgaagctggagagcgtggtgatcgtgagcaggcacggcgtgagggccccgaccaagttcacccagctgatgcaggacgtgaccccggacgcgttctacacctggccggtgaagctgggcgagctgaccccgaggggcggcgagctgatcgcctacctgggccactactggaggcagaggctggtggccgacggcctgctgccgaagaagggctgcccgcagagcggccaggtggccatcatcgccgacgtggacgagaggaccaggaagaccggtgaggccttcgccgccggcctggccccggactgcgccatcaccgtgcacacccaggccgacaccagcagcccggacccgctgttcaacccgctgaagaccggcgtgtgccagctggacgtggcccaggtgaccgacgccatcctggagagggccggcggcagcatcgccgacttcaccggccactaccagaccgccttcagggagctggagagggtgctgaacttcccgcagagcaacctggccctgaagagggagaagcaggacgagagcgccagcctgacccaggccctgccgagcgagctgaaggtgagcgccgacaacgtgagcctgaccggcgcctggagcctggccagcatgctgaccgagattttcctgctgcagcaggcccagggcatgccggagccgggctggggcaggatcaccgacagccaccagtggaacaccctgctgagcctgcacaacgcccagttcgacctgctgcagaggaccccggaggtggccaggagcagggccaccccgctgctggacctgatcaagaccgccctgaccccgcacccgccgcagaagcaggcctacggcgtgaccctgccgaccagcgtgctgttcatcgccggccacgacaccaacctggccaacctgggcggcgccctcgagctgcagtggaccctgccgggccagccggacaacaccccgccgggcggcgagctggtgttcgagaggtggaggaggctgagcgacaacagccagtggattcaggtgagcctggtgttccagaccctgcagcagatgagggacaagaccccgctgttcctgaacaccccgccgggcgaggtgaagctgaccctggccggctgcgaggagaggaacgcccagggcatgtgcagcctggccggcttcacccagatcgtgaacgaggccaggattccggcctgcagcctgagcgagaaggacgagctgtgacctaggtccccgaatttccccgatcgttcaaacatttggcaataaagtttcttaagattgaatcctgttgccggtcttgcgatgattatcatataatttctgttgaattacgttaagcatgtaataattaacatgtaatgcatgacgttatttatgagatgggtttttatgattagagtcccgcaattatacatttaatacgcgatagaaaacaaaatatagcgcgcaaactaggataaattatcgcgcgcggtgtcatctatgttactagatcgggaattg

SEQ ID NO: 86 - DNA, 7305 bp, Artificial Sequence
  Synthetic construct, pAG4816
tccatgctgtcctactacttgcttcatccccttctacattttgttctggtttttggcctgcatttcggatcatgatgtatgtgatttccaatctgctgcaatatgaatggagactctgtgctaaccatcaacaacatgaaatgcttatgaggcctttgctgagcagccaatcttgcctgtgtttatgtcttcacaggccgaattcctctgttttgtttttcaccctcaatatttggaaacatttatctaggttgtttgtgtccaggcctataaatcatacatgatgttgtcgtattggatgtgaatgtggtggcgtgttcagtgccttggatttgagtttgatgagagttgcttctgggtcaccactcaccattatcgatgctcctcttcagcataaggtaaaagtcttccctgtttacgttattttacccactatggttgcttgggttggttttttcctgattgcttatgccatggaaagtcatttgatatgttgaacttgaattaactgtagaattgtatacatgttccatttgtgttgtacttccttcttttctattagtagcctcagatgagtgtgaaaaaaacagattatataacttgccctataaatcatttgaaaaaaatattgtacagtgagaaattgatatatagtgaatttttaagagcatgttttcctaaagaagtatatattttctatgtacaaaggccattgaagtaattgtagatacaggataatgtagactttttggacttacactgctacctttaagtaacaatcatgagcaatagtgttgcaatgatatttaggctgcattcgtttactctcttgatttccatgagcacgcttcccaaactgttaaactctgtgttttttgccaaaaaaaaatgcataggaaagttgcttttaaaaaatcatatcaatccattttttaagttatagctaatacttaattaatcatgcgctaataagtcactctgtttttcgtactagagagattgttttgaaccagcactcaagaacacagccttaacccagccaaataatgctacaacctaccagtccacacctcttgtaaagcatttgttgcatggaaaagctaagatgacagcaacctgttcaggaaaacaactgacaaggtcatagggagagggagcttttggaaaggtgccgtgcagttcaaacaattagttagcagtagggtgttggtttttgctcacagcaataagaagttaatcatggtgtaggcaacccaaataaaacaccaaaatatgcacaaggcagtttgttgtattctgtagtacagacaaaactaaaagtaatgaaagaagatgtggtgttagaaaaggaaacaatatcatgagtaatgtgtgggcattatgggaccacgaaataaaaagaacattttgatgagtcgtgtatcctcgatgagcctcaaaagttctctcaccccggataagaaacccttaagcaatgtgcaaagtttgcattctccactgacataatgcaaaataagatatcatcgatgacatagcaactcatgcatcatatcatgcctctctcaacctattcattcctactcatctacataagtatcttcagctaaatgttagaacataaacccataagtcacgtttgatgagtattaggcgtgacacatgacaaatcacagactcaagcaagataaagcaaaatgatgtgtacataaaactccagagctatatgtcatattgcaaaaagaggagagcttataagacaaggcatgactcacaaaaattcatttgcctttcgtgtcaaaaagaggagggctttacattatccatgtcatattgcaaaagaaagagagaaagaacaacacaatgctgcgtcaattatacatatctgtatgtccatcattattcatccacctttcgtgtaccacacttcatatatcatgagtcacttcatgtctggacattaacaaactctatcttaacatttagatgcaagagcctttatctcactataaatgcacgatgatttctcattgtttctcacaaaaagcattcagttcattagtcctacaacaacggatcctaaaccatgcgcgtgctgctcgtggccctggccctgctggctcttgctgccagcgccacctctgcccagagcgagccggagctgaagctggagagcgtggtgatcgtgagcaggcacggcgtgagggccccgaccaaggccacccagctgatgcaggacgtgaccccggacgcgttctacacctggccggtgaagctgggcgagctgaccccgaggggcggcgagctgatcgcctacctgggccactactggaggcagaggctggtggccgacggcctgctgccgaagaagggctgcccgcagagcggccaggtggccatcatcgccgacgtggacgagaggaccaggaagaccggcgaggccttcgccgccggcctggccccggactgcgccatcaccgtgcacacccaggccgacaccagcagcccggacccgctgttcaacccgctgaagaccggcgtgtgccagctggacaacgcccaggtgaccgacgccatcctggagagggccggcggcagcatcgccgacttcaccggccactaccagaccgccttcagggagctggagagggtgctgaacttcccgcagagcaacctgtgcctgaagagggagaagcaggacgagagctgcagcctgacccaggccctgccgagcgagctgaaggtgagcgccgacaacgtgagcctgaccggcgccgtgagcctggccagcatgctgaccgagattttcctgctgcagcaggcccagggcatgccggagccgggctggggcaggatcaccgacagccaccagtggaacaccctgctgagcctgcacaacgcccagttcgacctgctgcagaggaccccggaggtggccaggagcagggccaccccgctgctggacctgatcaagaccgccctgaccccgcacccgccgcagaagcaggcctacggcgtgaccctgccgaccagcgtgctgttcatcgccggccacgacaccaacctggccaacctgggcggcgccctcgagctgcagtggaccctgccgggccagccggacaacaccccgccgggcggcgagctggtgttcgagaggtggaggaggctgagcgacaacagccagtggattcaggtgagcctggtgttccagaccctgcagcagatgagggacaagaccccgctgtccctgaacaccccgccgggcgaggtgaagctgaccctggccggctgcgaggagaggaacgcccagggcatgtgcagcctggccggcttcacccagatcgtgaacgaggccaggattccggcctgcagcctgagcgagaaggacgagctgtgacctaggtccccgaatttccccgatcgttcaaacatttggcaataaagtttcttaagattgaatcctgttgccggtcttgcgatgattatcatataatttctgttgaattacgttaagcatgtaataattaacatgtaatgcatgacgttatttatgagatgggtttttatgattagagtcccgcaattatacatttaatacgcgatagaaaacaaaatatagcgcgcaaactaggataaattatcgcgcgcggtgtcatctatgttactagatcgggaattgggtaccatcaatcccgggataaaattttagtgaagctaaagcggtgaaagattatagaatttgatgtgccagattaataaatcgattaactcctaaagttcaagccgagactacagacacatgagctacataaatgagccaaggactcgagcaaagacaaatcgacacagacattataattcaagtcattctagaagattcatgagaagagtatcatttatttaaatcaatgacttgatcaaataagacctaggagctactattgataatatatatcatgggtatctagatcaagcattatgaagaagagcctaagtagaaggccccatgggctcgaccacaaacccaaggactcgacaataaagtctaggagggatcccatagctaaaaggactctagaagtgtatgtatggtaaagattttatcgagacaagaaatacgataaagatcttaacagaatcggagtcatacttgtaaaaatagagttggactcgtgtacaacttggtcttcgacttagttcggtcatgaattcagtaaccgactagatatgtaccatggaacccctagggcatgaggctatgagccataggatcatcagatccaaacatacaccaacaaatccatcacacaccgaagatccatattaacaagggattagctactttacaatttcagagtaacaaatagagccaaactcatagcacaggggaacttcatatcacaaatggaggcattgaattgatataaaaagctaaagttctaaaaagtttgaagtgctgaaacttcaaagccgctaactagtgaagcaccgaagccttccggggagagaagacatacacgacacgttagggacgtaaaatgacgaaattatacaactacctctatatgtaacacttatgtaatagaaaagacagaatccatatgaagatgtataatggatcaaccatataaatagataaacaatatatctgctatggggattggcattcttgtatccctacgcctgtatatcccctgtttagagaacctccgaaggtatatgatgctgaagattattgttgtcttgtctttcatcatatatcgagtctttccctaggatattattattcgcaatgtgcattacatggttaatcgattgagagaacatgcatctcacctttagctgataaacgataatccatgttttacacttcgtagctactcatgagtttcgatatacaaatttgttttctggactacgtaccattccatcctcttaggagaggagaggaagtgtcctcgatttaattatgttgtcattttgtagttcttcacaaaatctcaacaggtaccaaacacattgtttccacaagacatattttagtcacaacaaatctatattattattaatcactaaaactatactgaggctcagatgcttttactagctcttgctagtatgtgatgtaggtctctttcgacatcattccatcaaaatcatatgattagcccataccaaacatttctataccattcagagaccagaatagtcttttctaatagaaaaaaggaaaatagagtgggccgacgacgacacaaattactgcgtggaccagaaaatagtgagacacggaagacaaaagaagtaaaagaggcaaggactacggcccacatgagattcggccccgccacctccggcaaccagcggccgatccaacggcagtgcatcctcaacggcgcgcgcgcgcgcgcgcgcgcacaacctcgtatatatcgccgcgcggaagcggcgcgaccgaggaagccttgtcctcgacaccccctacacaggtgtcgcgctgcccccgacacgagtcccgcatgcgtcccacgcggccgcgccagatcccgcctccgcgcgttgccacgccctctataaacacccagctctctccctcgccctcatctatcgcactcgtagtcgtagctcaagcatcagcggcaggagctctgggcagcgtgcgcacgtggggtacctagctcgctctgctagcctaccggatcctaaaccatgcgcgtgctgctcgtggccctggccctgctggctcttgctgccagcgccacctctgcccagagcgagccggagctgaagctggagagcgtggtgatcgtgagcaggcacggcgtgagggccccgaccaaggccacccagctgatgcaggacgtgaccccggacgcgttctacacctggccggtgaagctgggcgagctgaccccgaggggcggcgagctgatcgcctacctgggccactactggaggcagaggctggtggccgacggcctgctgccgaagaagggctgcccgcagagcggccaggtggccatcatcgccgacgtggacgagaggaccaggaagaccggcgaggccttcgccgccggcctggccccggactgcgccatcaccgtgcacacccaggccgacaccagcagcccggacccgctgttcaacccgctgaagaccggcgtgtgccagctggacaacgcccaggtgaccgacgccatcctggagagggccggcggcagcatcgccgacttcaccggccactaccagaccgccttcagggagctggagagggtgctgaacttcccgcagagcaacctgtgcctgaagagggagaagcaggacgagagctgcagcctgacccaggccctgccgagcgagctgaaggtgagcgccgacaacgtgagcctgaccggcgccgtgagcctggccagcatgctgaccgagattttcctgctgcagcaggcccagggcatgccggagccgggctggggcaggatcaccgacagccaccagtggaacaccctgctgagcctgcacaacgcccagttcgacctgctgcagaggaccccggaggtggccaggagcagggccaccccgctgctggacctgatcaagaccgccctgaccccgcacccgccgcagaagcaggcctacggcgtgaccctgccgaccagcgtgctgttcatcgccggccacgacaccaacctggccaacctgggcggcgccctcgagctgcagtggaccctgccgggccagccggacaacaccccgccgggcggcgagctggtgttcgagaggtggaggaggctgagcgacaacagccagtggattcaggtgagcctggtgttccagaccctgcagcagatgagggacaagaccccgctgtccctgaacaccccgccgggcgaggtgaagctgaccctggccggctgcgaggagaggaacgcccagggcatgtgcagcctggccggcttcacccagatcgtgaacgaggccaggattccggcctgcagcctggacgagctgaaggccgaggccaagtgacctaggtccccgaatttccccgatcgttcaaacatttggcaataaagtttcttaagattgaatcctgttgccggtcttgcgatgattatcatataatttctgttgaattacgttaagcatgtaataattaacatgtaatgcatgacgttatttatgagatgggtttttatgattagagtcccgcaattatacatttaatacgcgatagaaaacaaaatatagcgcgcaaactaggataaattatcgcgcgcggtgtcatctatgttactagatcgggaattg

SEQ ID NO: 87 - DNA, 5942 bp, Artificial Sequence
  Synthetic construct, pAG4282
aaagtaatcatattattttatgtgtgaatcttctttactttttcatttgattatgattatgaaggtatgaccttcataaccttcgtccgaaatccattatatccaaaggaaaataatgcttcgaaggacgaaggattttgatatttaacattttatgttgccttgttcttaattcatagcatttgagaacaagtccccaacaccaatctttatctttactatattaaagcaccagttcaacgatcgtctcgtgtcaatattattaaaaaactcctacatttctttataatcaacccgcactcttataatctcttctcttactactataataagagagtttatgtacaaaataaggtgaaattatgtataagtgttctggaccttggttgttggctcatattcacacaacctaatcaatagaaaacatatgttttattaaaacaaaatttatcatatatatatatatatatatatatatatatatatatatatataatataaaccgtagcaatgcacaggcatatgactagtggcaacttaataccatgtgtgtattaagatgaataagaggtatccaaataaataacttgttcgcttacgtctggatcgaaaggggttggaaacgattaaatctcttcctagtcaaaattaaatagaaggagatttaatcgatttctcccaatccccttcgatccaggtgcaaccgaataagtccttaaatgttgaggaacacgaaacaaccatgcattggcatgtaaagctccaagaattcgttgtatccttaacaactcacagaacatcaaccaaaattgcacgtcaagggtattgggtaagaaacaatcaaacaaatcctctctgtgtgcaaagaaacacggtgagtcatgccgagatcatactcatctgatatacatgcttacagctcacaagacattacaaacaactcatattgcattacaaagatcgtttcatgaaaaataaaataggccggaacaggacaaaaatccttgacgtgtaaagtaaatttacaacaaaaaaaaagccatatgtcaagctaaatctaattcgttttacgtagatcaacaacctgtagaaggcaacaaaactgagccacgcagaagtacagaatgattccagatgaaccatcgacgtgctacgtaaagagagtgacgagtcatatacatttggcaagaaaccatgaagctgcctacagccgtctcggtggcataagaacacaagaaattgtgttaattaatcaaagctataaataacgctcgcatgcctgtgcacttctccatcaccaccactgggtcttcagaccattagctttatctactccagagcgcagaagaacccgatcgacaccggatcctaaaccatgcgcgtgctgctcgtggccctggccctgctggctcttgctgccagcgccacctctgcccagagcgagccggagctgaagctggagagcgtggtgatcgtgagcaggcacggcgtgagggccccgaccaaggccacccagctgatgcaggacgtgaccccggacgcgttctacacctggccggtgaagctgggcgagctgaccccgaggggcggcgagctgatcgcctacctgggccactactggaggcagaggctggtggccgacggcctgctgccgaagaagggctgcccgcagagcggccaggtggccatcatcgccgacgtggacgagaggaccaggaagaccggcgaggccttcgccgccggcctggccccggactgcgccatcaccgtgcacacccaggccgacaccagcagcccggacccgctgttcaacccgctgaagaccggcgtgtgccagctggacaacgcccaggtgaccgacgccatcctggagagggccggcggcagcatcgccgacttcaccggccactaccagaccgccttcagggagctggagagggtgctgaacttcccgcagagcaacctgtgcctgaagagggagaagcaggacgagagctgcagcctgacccaggccctgccgagcgagctgaaggtgagcgccgacaacgtgagcctgaccggcgccgtgagcctggccagcatgctgaccgagattttcctgctgcagcaggcccagggcatgccggagccgggctggggcaggatcaccgacagccaccagtggaacaccctgctgagcctgcacaacgcccagttcgacctgctgcagaggaccccggaggtggccaggagcagggccaccccgctgctggacctgatcaagaccgccctgaccccgcacccgccgcagaagcaggcctacggcgtgaccctgccgaccagcgtgctgttcatcgccggccacgacaccaacctggccaacctgggcggcgccctcgagctgcagtggaccctgccgggccagccggacaacaccccgccgggcggcgagctggtgttcgagaggtggaggaggctgagcgacaacagccagtggattcaggtgagcctggtgttccagaccctgcagcagatgagggacaagaccccgctgtccctgaacaccccgccgggcgaggtgaagctgaccctggccggctgcgaggagaggaacgcccagggcatgtgcagcctggccggcttcacccagatcgtgaacgaggccaggattccggcctgcagcctgagcgagaaggacgagctgtgacctaggtccccgaatttccccgatcgttcaaacatttggcaataaagtttcttaagattgaatcctgttgccggtcttgcgatgattatcatataatttctgttgaattacgttaagcatgtaataattaacatgtaatgcatgacgttatttatgagatgggtttttatgattagagtcccgcaattatacatttaatacgcgatagaaaacaaaatatagcgcgcaaactaggataaattatcgcgcgcggtgtcatctatgttactagatcgggaattgggtaccaaagtaatcatattattttatgtgtgaatcttctttactttttcatttgattatgattatgaaggtatgaccttcataaccttcgtccgaaatccattatatccaaaggaaaataatgcttcgaaggacgaaggattttgatatttaacattttatgttgccttgttcttaattcatagcatttgagaacaagtccccaacaccaatctttatctttactatattaaagcaccagttcaacgatcgtctcgtgtcaatattattaaaaaactcctacatttctttataatcaacccgcactcttataatctcttctcttactactataataagagagtttatgtacaaaataaggtgaaattatgtataagtgttctggaccttggttgttggctcatattcacacaacctaatcaatagaaaacatatgttttattaaaacaaaatttatcatatatatatatatatatatatatatatatatatatatatataatataaaccgtagcaatgcacaggcatatgactagtggcaacttaataccatgtgtgtattaagatgaataagaggtatccaaataaataacttgttcgcttacgtctggatcgaaaggggttggaaacgattaaatctcttcctagtcaaaattaaatagaaggagatttaatcgatttctcccaatccccttcgatccaggtgcaaccgaataagtccttaaatgttgaggaacacgaaacaaccatgcattggcatgtaaagctccaagaattcgttgtatccttaacaactcacagaacatcaaccaaaattgcacgtcaagggtattgggtaagaaacaatcaaacaaatcctctctgtgtgcaaagaaacacggtgagtcatgccgagatcatactcatctgatatacatgcttacagctcacaagacattacaaacaactcatattgcattacaaagatcgtttcatgaaaaataaaataggccggaacaggacaaaaatccttgacgtgtaaagtaaatttacaacaaaaaaaaagccatatgtcaagctaaatctaattcgttttacgtagatcaacaacctgtagaaggcaacaaaactgagccacgcagaagtacagaatgattccagatgaaccatcgacgtgctacgtaaagagagtgacgagtcatatacatttggcaagaaaccatgaagctgcctacagccgtctcggtggcataagaacacaagaaattgtgttaattaatcaaagctataaataacgctcgcatgcctgtgcacttctccatcaccaccactgggtcttcagaccattagctttatctactccagagcgcagaagaacccgatcgacaccggatcctaaaccatgcgcgtgctgctcgtggccctggccctgctggctcttgctgccagcgccacctctgcccagagcgagccggagctgaagctggagagcgtggtgatcgtgagcaggcacggcgtgagggccccgaccaaggccacccagctgatgcaggacgtgaccccggacgcgttctacacctggccggtgaagctgggcgagctgaccccgaggggcggcgagctgatcgcctacctgggccactactggaggcagaggctggtggccgacggcctgctgccgaagaagggctgcccgcagagcggccaggtggccatcatcgccgacgtggacgagaggaccaggaagaccggcgaggccttcgccgccggcctggccccggactgcgccatcaccgtgcacacccaggccgacaccagcagcccggacccgctgttcaacccgctgaagaccggcgtgtgccagctggacaacgcccaggtgaccgacgccatcctggagagggccggcggcagcatcgccgacttcaccggccactaccagaccgccttcagggagctggagagggtgctgaacttcccgcagagcaacctgtgcctgaagagggagaagcaggacgagagctgcagcctgacccaggccctgccgagcgagctgaaggtgagcgccgacaacgtgagcctgaccggcgccgtgagcctggccagcatgctgaccgagattttcctgctgcagcaggcccagggcatgccggagccgggctggggcaggatcaccgacagccaccagtggaacaccctgctgagcctgcacaacgcccagttcgacctgctgcagaggaccccggaggtggccaggagcagggccaccccgctgctggacctgatcaagaccgccctgaccccgcacccgccgcagaagcaggcctacggcgtgaccctgccgaccagcgtgctgttcatcgccggccacgacaccaacctggccaacctgggcggcgccctcgagctgcagtggaccctgccgggccagccggacaacaccccgccgggcggcgagctggtgttcgagaggtggaggaggctgagcgacaacagccagtggattcaggtgagcctggtgttccagaccctgcagcagatgagggacaagaccccgctgtccctgaacaccccgccgggcgaggtgaagctgaccctggccggctgcgaggagaggaacgcccagggcatgtgcagcctggccggcttcacccagatcgtgaacgaggccaggattccggcctgcagcctgagcgagaaggacgagctgtgacctaggtccccgaatttccccgatcgttcaaacatttggcaataaagtttcttaagattgaatcctgttgccggtcttgcgatgattatcatataatttctgttgaattacgttaagcatgtaataattaacatgtaatgcatgacgttatttatgagatgggtttttatgattagagtcccgcaattatacatttaatacgcgatagaaaacaaaatatagcgcgcaaactaggataaattatcgcgcgcggtgtcatctatgttactagatcgggaattg

SEQ ID NO: 88 - DNA, 7305 bp, Artificial Sequence
  Synthetic construct, pAG4810
tccatgctgtcctactacttgcttcatccccttctacattttgttctggtttttggcctgcatttcggatcatgatgtatgtgatttccaatctgctgcaatatgaatggagactctgtgctaaccatcaacaacatgaaatgcttatgaggcctttgctgagcagccaatcttgcctgtgtttatgtcttcacaggccgaattcctctgttttgtttttcaccctcaatatttggaaacatttatctaggttgtttgtgtccaggcctataaatcatacatgatgttgtcgtattggatgtgaatgtggtggcgtgttcagtgccttggatttgagtttgatgagagttgcttctgggtcaccactcaccattatcgatgctcctcttcagcataaggtaaaagtcttccctgtttacgttattttacccactatggttgcttgggttggttttttcctgattgcttatgccatggaaagtcatttgatatgttgaacttgaattaactgtagaattgtatacatgttccatttgtgttgtacttccttcttttctattagtagcctcagatgagtgtgaaaaaaacagattatataacttgccctataaatcatttgaaaaaaatattgtacagtgagaaattgatatatagtgaatttttaagagcatgttttcctaaagaagtatatattttctatgtacaaaggccattgaagtaattgtagatacaggataatgtagactttttggacttacactgctacctttaagtaacaatcatgagcaatagtgttgcaatgatatttaggctgcattcgtttactctcttgatttccatgagcacgcttcccaaactgttaaactctgtgttttttgccaaaaaaaaatgcataggaaagttgcttttaaaaaatcatatcaatccattttttaagttatagctaatacttaattaatcatgcgctaataagtcactctgtttttcgtactagagagattgttttgaaccagcactcaagaacacagccttaacccagccaaataatgctacaacctaccagtccacacctcttgtaaagcatttgttgcatggaaaagctaagatgacagcaacctgttcaggaaaacaactgacaaggtcatagggagagggagcttttggaaaggtgccgtgcagttcaaacaattagttagcagtagggtgttggtttttgctcacagcaataagaagttaatcatggtgtaggcaacccaaataaaacaccaaaatatgcacaaggcagtttgttgtattctgtagtacagacaaaactaaaagtaatgaaagaagatgtggtgttagaaaaggaaacaatatcatgagtaatgtgtgggcattatgggaccacgaaataaaaagaacattttgatgagtcgtgtatcctcgatgagcctcaaaagttctctcaccccggataagaaacccttaagcaatgtgcaaagtttgcattctccactgacataatgcaaaataagatatcatcgatgacatagcaactcatgcatcatatcatgcctctctcaacctattcattcctactcatctacataagtatcttcagctaaatgttagaacataaacccataagtcacgtttgatgagtattaggcgtgacacatgacaaatcacagactcaagcaagataaagcaaaatgatgtgtacataaaactccagagctatatgtcatattgcaaaaagaggagagcttataagacaaggcatgactcacaaaaattcatttgcctttcgtgtcaaaaagaggagggctttacattatccatgtcatattgcaaaagaaagagagaaagaacaacacaatgctgcgtcaattatacatatctgtatgtccatcattattcatccacctttcgtgtaccacacttcatatatcatgagtcacttcatgtctggacattaacaaactctatcttaacatttagatgcaagagcctttatctcactataaatgcacgatgatttctcattgtttctcacaaaaagcattcagttcattagtcctacaacaacggatcctaaaccatgcgcgtgctgctcgtggccctggccctgctggctcttgctgccagcgccacctctgcccagagcgagccggagctgaagctggagagcgtggtgatcgtgagcaggcacggcgtgagggccccgaccaaggccacccagctgatgcaggacgtgaccccggacgcgttctacacctggccggtgaagctgggcgagctgaccccgaggggcggcgagctgatcgcctacctgggccactactggaggcagaggctggtggccgacggcctgctgccgaagaagggctgcccgcagagcggccaggtggccatcatcgccgacgtggacgagaggaccaggaagaccggcgaggccttcgccgccggcctggccccggactgcgccatcaccgtgcacacccaggccgacaccagcagcccggacccgctgttcaacccgctgaagaccggcgtgtgccagctggacaacgcccaggtgaccgacgccatcctggagagggccggcggcagcatcgccgacttcaccggccactaccagaccgccttcagggagctggagagggtgctgaacttcccgcagagcaacctgtgcctgaagagggagaagcaggacgagagctgcagcctgacccaggccctgccgagcgagctgaaggtgagcgccgacaacgtgagcctgaccggcgccgtgagcctggccagcatgctgaccgagattttcctgctgcagcaggcccagggcatgccggagccgggctggggcaggatcaccgacagccaccagtggaacaccctgctgagcctgcacaacgcccagttcgacctgctgcagaggaccccggaggtggccaggagcagggccaccccgctgctggacctgatcaagaccgccctgaccccgcacccgccgcagaagcaggcctacggcgtgaccctgccgaccagcgtgctgttcatcgccggccacgacaccaacctggccaacctgggcggcgccctcgagctgcagtggaccctgccgggccagccggacaacaccccgccgggcggcgagctggtgttcgagaggtggaggaggctgagcgacaacagccagtggattcaggtgagcctggtgttccagaccctgcagcagatgagggacaagaccccgctgtccctgaacaccccgccgggcgaggtgaagctgaccctggccggctgcgaggagaggaacgcccagggcatgtgcagcctggccggcttcacccagatcgtgaacgaggccaggattccggcctgcagcctggacgagctgaaggccgaggccaagtgacctaggtccccgaatttccccgatcgttcaaacatttggcaataaagtttcttaagattgaatcctgttgccggtcttgcgatgattatcatataatttctgttgaattacgttaagcatgtaataattaacatgtaatgcatgacgttatttatgagatgggtttttatgattagagtcccgcaattatacatttaatacgcgatagaaaacaaaatatagcgcgcaaactaggataaattatcgcgcgcggtgtcatctatgttactagatcgggaattgggtaccatcaatcccgggataaaattttagtgaagctaaagcggtgaaagattatagaatttgatgtgccagattaataaatcgattaactcctaaagttcaagccgagactacagacacatgagctacataaatgagccaaggactcgagcaaagacaaatcgacacagacattataattcaagtcattctagaagattcatgagaagagtatcatttatttaaatcaatgacttgatcaaataagacctaggagctactattgataatatatatcatgggtatctagatcaagcattatgaagaagagcctaagtagaaggccccatgggctcgaccacaaacccaaggactcgacaataaagtctaggagggatcccatagctaaaaggactctagaagtgtatgtatggtaaagattttatcgagacaagaaatacgataaagatcttaacagaatcggagtcatacttgtaaaaatagagttggactcgtgtacaacttggtcttcgacttagttcggtcatgaattcagtaaccgactagatatgtaccatggaacccctagggcatgaggctatgagccataggatcatcagatccaaacatacaccaacaaatccatcacacaccgaagatccatattaacaagggattagctactttacaatttcagagtaacaaatagagccaaactcatagcacaggggaacttcatatcacaaatggaggcattgaattgatataaaaagctaaagttctaaaaagtttgaagtgctgaaacttcaaagccgctaactagtgaagcaccgaagccttccggggagagaagacatacacgacacgttagggacgtaaaatgacgaaattatacaactacctctatatgtaacacttatgtaatagaaaagacagaatccatatgaagatgtataatggatcaaccatataaatagataaacaatatatctgctatggggattggcattcttgtatccctacgcctgtatatcccctgtttagagaacctccgaaggtatatgatgctgaagattattgttgtcttgtctttcatcatatatcgagtctttccctaggatattattattcgcaatgtgcattacatggttaatcgattgagagaacatgcatctcacctttagctgataaacgataatccatgttttacacttcgtagctactcatgagtttcgatatacaaatttgttttctggactacgtaccattccatcctcttaggagaggagaggaagtgtcctcgatttaattatgttgtcattttgtagttcttcacaaaatctcaacaggtaccaaacacattgtttccacaagacatattttagtcacaacaaatctatattattattaatcactaaaactatactgaggctcagatgcttttactagctcttgctagtatgtgatgtaggtctctttcgacatcattccatcaaaatcatatgattagcccataccaaacatttctataccattcagagaccagaatagtcttttctaatagaaaaaaggaaaatagagtgggccgacgacgacacaaattactgcgtggaccagaaaatagtgagacacggaagacaaaagaagtaaaagaggcaaggactacggcccacatgagattcggccccgccacctccggcaaccagcggccgatccaacggcagtgcatcctcaacggcgcgcgcgcgcgcgcgcgcgcacaacctcgtatatatcgccgcgcggaagcggcgcgaccgaggaagccttgtcctcgacaccccctacacaggtgtcgcgctgcccccgacacgagtcccgcatgcgtcccacgcggccgcgccagatcccgcctccgcgcgttgccacgccctctataaacacccagctctctccctcgccctcatctatcgcactcgtagtcgtagctcaagcatcagcggcaggagctctgggcagcgtgcgcacgtggggtacctagctcgctctgctagcctaccggatcctaaaccatgcgcgtgctgctcgtggccctggccctgctggctcttgctgccagcgccacctctgcccagagcgagccggagctgaagctggagagcgtggtgatcgtgagcaggcacggcgtgagggccccgaccaaggccacccagctgatgcaggacgtgaccccggacgcgttctacacctggccggtgaagctgggcgagctgaccccgaggggcggcgagctgatcgcctacctgggccactactggaggcagaggctggtggccgacggcctgctgccgaagaagggctgcccgcagagcggccaggtggccatcatcgccgacgtggacgagaggaccaggaagaccggcgaggccttcgccgccggcctggccccggactgcgccatcaccgtgcacacccaggccgacaccagcagcccggacccgctgttcaacccgctgaagaccggcgtgtgccagctggacaacgcccaggtgaccgacgccatcctggagagggccggcggcagcatcgccgacttcaccggccactaccagaccgccttcagggagctggagagggtgctgaacttcccgcagagcaacctgtgcctgaagagggagaagcaggacgagagctgcagcctgacccaggccctgccgagcgagctgaaggtgagcgccgacaacgtgagcctgaccggcgccgtgagcctggccagcatgctgaccgagattttcctgctgcagcaggcccagggcatgccggagccgggctggggcaggatcaccgacagccaccagtggaacaccctgctgagcctgcacaacgcccagttcgacctgctgcagaggaccccggaggtggccaggagcagggccaccccgctgctggacctgatcaagaccgccctgaccccgcacccgccgcagaagcaggcctacggcgtgaccctgccgaccagcgtgctgttcatcgccggccacgacaccaacctggccaacctgggcggcgccctcgagctgcagtggaccctgccgggccagccggacaacaccccgccgggcggcgagctggtgttcgagaggtggaggaggctgagcgacaacagccagtggattcaggtgagcctggtgttccagaccctgcagcagatgagggacaagaccccgctgtccctgaacaccccgccgggcgaggtgaagctgaccctggccggctgcgaggagaggaacgcccagggcatgtgcagcctggccggcttcacccagatcgtgaacgaggccaggattccggcctgcagcctgagcgagaaggacgagctgtgacctaggtccccgaatttccccgatcgttcaaacatttggcaataaagtttcttaagattgaatcctgttgccggtcttgcgatgattatcatataatttctgttgaattacgttaagcatgtaataattaacatgtaatgcatgacgttatttatgagatgggtttttatgattagagtcccgcaattatacatttaatacgcgatagaaaacaaaatatagcgcgcaaactaggataaattatcgcgcgcggtgtcatctatgttactagatcgggaattg

SEQ ID NO: 89 - DNA, 6579 bp, Artificial Sequence
  Synthetic construct, pAG4798
ataaaattttagtgaagctaaagcggtgaaagattatagaatttgatgtgccagattaataaatcgattaactcctaaagttcaagccgagactacagacacatgagctacataaatgagccaaggactcgagcaaagacaaatcgacacagacattataattcaagtcattctagaagattcatgagaagagtatcatttatttaaatcaatgacttgatcaaataagacctaggagctactattgataatatatatcatgggtatctagatcaagcattatgaagaagagcctaagtagaaggccccatgggctcgaccacaaacccaaggactcgacaataaagtctaggagggatcccatagctaaaaggactctagaagtgtatgtatggtaaagattttatcgagacaagaaatacgataaagatcttaacagaatcggagtcatacttgtaaaaatagagttggactcgtgtacaacttggtcttcgacttagttcggtcatgaattcagtaaccgactagatatgtaccatggaacccctagggcatgaggctatgagccataggatcatcagatccaaacatacaccaacaaatccatcacacaccgaagatccatattaacaagggattagctactttacaatttcagagtaacaaatagagccaaactcatagcacaggggaacttcatatcacaaatggaggcattgaattgatataaaaagctaaagttctaaaaagtttgaagtgctgaaacttcaaagccgctaactagtgaagcaccgaagccttccggggagagaagacatacacgacacgttagggacgtaaaatgacgaaattatacaactacctctatatgtaacacttatgtaatagaaaagacagaatccatatgaagatgtataatggatcaaccatataaatagataaacaatatatctgctatggggattggcattcttgtatccctacgcctgtatatcccctgtttagagaacctccgaaggtatatgatgctgaagattattgttgtcttgtctttcatcatatatcgagtctttccctaggatattattattcgcaatgtgcattacatggttaatcgattgagagaacatgcatctcacctttagctgataaacgataatccatgttttacacttcgtagctactcatgagtttcgatatacaaatttgttttctggactacgtaccattccatcctcttaggagaggagaggaagtgtcctcgatttaattatgttgtcattttgtagttcttcacaaaatctcaacaggtaccaaacacattgtttccacaagacatattttagtcacaacaaatctatattattattaatcactaaaactatactgaggctcagatgcttttactagctcttgctagtatgtgatgtaggtctctttcgacatcattccatcaaaatcatatgattagcccataccaaacatttctataccattcagagaccagaatagtcttttctaatagaaaaaaggaaaatagagtgggccgacgacgacacaaattactgcgtggaccagaaaatagtgagacacggaagacaaaagaagtaaaagaggcaaggactacggcccacatgagattcggccccgccacctccggcaaccagcggccgatccaacggcagtgcatcctcaacggcgcgcgcgcgcgcgcgcgcgcacaacctcgtatatatcgccgcgcggaagcggcgcgaccgaggaagccttgtcctcgacaccccctacacaggtgtcgcgctgcccccgacacgagtcccgcatgcgtcccacgcggccgcgccagatcccgcctccgcgcgttgccacgccctctataaacacccagctctctccctcgccctcatctatcgcactcgtagtcgtagctcaagcatcagcggcaggagctctgggcagcgtgcgcacgtggggtacctagctcgctctgctagcctaccggatccaccatgagggtgttgctcgttgccctcgctctcctggctctcgctgcgagcgccaccagcgctgcgcagtccgagccggagctgaagctggagtccgtggtgatcgtgtcgcgccacggggtgcgcgccccgaccaaggccacgcagctcatgcaggacgtgaccccggacgcctggccgacctggccggtgaagctcggcgagctgaccccgcgcggcggcgagctgatcgcctacctcggccactactggcgccagcgcctcgtggccgacggcctcctcccgaagtgcggctgcccgcagtccggccaggtggcgatcatcgccgacgtggacgagcgcacccgcaagacgggcgaggccttcgccgccggcctcgccccggactgcgccatcaccgtgcacacccaggccgacacctcctccccggacccgctcttcaacccgctcaagaccggcgtgtgccagctcgacaacgccaacgtgaccgacgccatcctggagcgcgccggcggctccatcgccgacttcaccggccactaccagaccgccttccgcgagctggagcgcgtgctcaacttcccgcagtcgaacctctgcctcaagcgcgagaagcaggacgagtcctgctccctcacccaggccctcccgtccgagctgaaggtgtccgccgactgcgtgtccctcaccggcgccgtgtccctcgcctccatgctcaccgaaatcttcctcctccagcaggcccagggcatgccggagccgggctggggccgcatcaccgactcccaccagtggaacaccctcctctccctccacaacgcccagttcgacctcctccagcgcaccccggaggtggcccgctcccgcgccaccccgctcctcgacctcatcaagaccgccctcaccccgcacccgccgcagaagcaggcctacggcgtgaccctcccgacctcggtgctcttcatcgccggccacgacaccaacctcgccaacctcggcggcgccctggagctgaactggaccctcccgggccagccggacaacaccccgccgggcggcgagctggtgttcgagcgctggcgccgcctctccgacaactcccagtggattcaggtgtccctcgtgttccagaccctccagcagatgcgcgacaagaccccgctctccctcaacaccccgccgggcgaggtgaagctcaccctggccggctgcgaggagcgcaacgcgcagggcatgtgctccctcgccggcttcacccagatcgtgaacgaggcccgcatcccggcctgctccctctccgagaaggacgagctgtaacctaggtccccgaatttccccgatcgttcaaacatttggcaataaagtttcttaagattgaatcctgttgccggtcttgcgatgattatcatataatttctgttgaattacgttaagcatgtaataattaacatgtaatgcatgacgttatttatgagatgggtttttatgattagagtcccgcaattatacatttaatacgcgatagaaaacaaaatatagcgcgcaaactaggataaattatcgcgcgcggtgtcatctatgttactagatcgggaattgggtaccaaagtaatcatattattttatgtgtgaatcttctttactttttcatttgattatgattatgaaggtatgaccttcataaccttcgtccgaaatccattatatccaaaggaaaataatgcttcgaaggacgaaggattttgatatttaacattttatgttgccttgttcttaattcatagcatttgagaacaagtccccaacaccaatctttatctttactatattaaagcaccagttcaacgatcgtctcgtgtcaatattattaaaaaactcctacatttctttataatcaacccgcactcttataatctcttctcttactactataataagagagtttatgtacaaaataaggtgaaattatgtataagtgttctggaccttggttgttggctcatattcacacaacctaatcaatagaaaacatatgttttattaaaacaaaatttatcatatatatatatatatatatatatatatatatatatatatataatataaaccgtagcaatgcacaggcatatgactagtggcaacttaataccatgtgtgtattaagatgaataagaggtatccaaataaataacttgttcgcttacgtctggatcgaaaggggttggaaacgattaaatctcttcctagtcaaaattaaatagaaggagatttaatcgatttctcccaatccccttcgatccaggtgcaaccgaataagtccttaaatgttgaggaacacgaaacaaccatgcattggcatgtaaagctccaagaattcgttgtatccttaacaactcacagaacatcaaccaaaattgcacgtcaagggtattgggtaagaaacaatcaaacaaatcctctctgtgtgcaaagaaacacggtgagtcatgccgagatcatactcatctgatatacatgcttacagctcacaagacattacaaacaactcatattgcattacaaagatcgtttcatgaaaaataaaataggccggaacaggacaaaaatccttgacgtgtaaagtaaatttacaacaaaaaaaaagccatatgtcaagctaaatctaattcgttttacgtagatcaacaacctgtagaaggcaacaaaactgagccacgcagaagtacagaatgattccagatgaaccatcgacgtgctacgtaaagagagtgacgagtcatatacatttggcaagaaaccatgaagctgcctacagccgtctcggtggcataagaacacaagaaattgtgttaattaatcaaagctataaataacgctcgcatgcctgtgcacttctccatcaccaccactgggtcttcagaccattagctttatctactccagagcgcagaagaacccgatcgacaccggatccaccatgagggtgttgctcgttgccctcgctctcctggctctcgctgcgagcgccaccagcgctgcgcagtccgagccggagctgaagctggagtccgtggtgatcgtgtcgcgccacggggtgcgcgccccgaccaaggccacgcagctcatgcaggacgtgaccccggacgcctggccgacctggccggtgaagctcggcgagctgaccccgcgcggcggcgagctgatcgcctacctcggccactactggcgccagcgcctcgtggccgacggcctcctcccgaagtgcggctgcccgcagtccggccaggtggcgatcatcgccgacgtggacgagcgcacccgcaagacgggcgaggccttcgccgccggcctcgccccggactgcgccatcaccgtgcacacccaggccgacacctcctccccggacccgctcttcaacccgctcaagaccggcgtgtgccagctcgacaacgccaacgtgaccgacgccatcctggagcgcgccggcggctccatcgccgacttcaccggccactaccagaccgccttccgcgagctggagcgcgtgctcaacttcccgcagtcgaacctctgcctcaagcgcgagaagcaggacgagtcctgctccctcacccaggccctcccgtccgagctgaaggtgtccgccgactgcgtgtccctcaccggcgccgtgtccctcgcctccatgctcaccgaaatcttcctcctccagcaggcccagggcatgccggagccgggctggggccgcatcaccgactcccaccagtggaacaccctcctctccctccacaacgcccagttcgacctcctccagcgcaccccggaggtggcccgctcccgcgccaccccgctcctcgacctcatcaagaccgccctcaccccgcacccgccgcagaagcaggcctacggcgtgaccctcccgacctcggtgctcttcatcgccggccacgacaccaacctcgccaacctcggcggcgccctggagctgaactggaccctcccgggccagccggacaacaccccgccgggcggcgagctggtgttcgagcgctggcgccgcctctccgacaactcccagtggattcaggtgtccctcgtgttccagaccctccagcagatgcgcgacaagaccccgctctccctcaacaccccgccgggcgaggtgaagctcaccctggccggctgcgaggagcgcaacgcgcagggcatgtgctccctcgccggcttcacccagatcgtgaacgaggcccgcatcccggcctgctccctctccgagaaggacgagctgtaacctaggtccccgaatttccccgatcgttcaaacatttggcaataaagtttcttaagattgaatcctgttgccggtcttgcgatgattatcatataatttctgttgaattacgttaagcatgtaataattaacatgtaatgcatgacgttatttatgagatgggtttttatgattagagtcccgcaattatacatttaatacgcgatagaaaacaaaatatagcgcgcaaactaggataaattatcgcgcgcggtgtcatctatgttactagatcgggaattg

SEQ ID NO: 90 - DNA, 7247 bp, Artificial Sequence
  Synthetic construct, pAG4797
ataaaattttagtgaagctaaagcggtgaaagattatagaatttgatgtgccagattaataaatcgattaactcctaaagttcaagccgagactacagacacatgagctacataaatgagccaaggactcgagcaaagacaaatcgacacagacattataattcaagtcattctagaagattcatgagaagagtatcatttatttaaatcaatgacttgatcaaataagacctaggagctactattgataatatatatcatgggtatctagatcaagcattatgaagaagagcctaagtagaaggccccatgggctcgaccacaaacccaaggactcgacaataaagtctaggagggatcccatagctaaaaggactctagaagtgtatgtatggtaaagattttatcgagacaagaaatacgataaagatcttaacagaatcggagtcatacttgtaaaaatagagttggactcgtgtacaacttggtcttcgacttagttcggtcatgaattcagtaaccgactagatatgtaccatggaacccctagggcatgaggctatgagccataggatcatcagatccaaacatacaccaacaaatccatcacacaccgaagatccatattaacaagggattagctactttacaatttcagagtaacaaatagagccaaactcatagcacaggggaacttcatatcacaaatggaggcattgaattgatataaaaagctaaagttctaaaaagtttgaagtgctgaaacttcaaagccgctaactagtgaagcaccgaagccttccggggagagaagacatacacgacacgttagggacgtaaaatgacgaaattatacaactacctctatatgtaacacttatgtaatagaaaagacagaatccatatgaagatgtataatggatcaaccatataaatagataaacaatatatctgctatggggattggcattcttgtatccctacgcctgtatatcccctgtttagagaacctccgaaggtatatgatgctgaagattattgttgtcttgtctttcatcatatatcgagtctttccctaggatattattattcgcaatgtgcattacatggttaatcgattgagagaacatgcatctcacctttagctgataaacgataatccatgttttacacttcgtagctactcatgagtttcgatatacaaatttgttttctggactacgtaccattccatcctcttaggagaggagaggaagtgtcctcgatttaattatgttgtcattttgtagttcttcacaaaatctcaacaggtaccaaacacattgtttccacaagacatattttagtcacaacaaatctatattattattaatcactaaaactatactgaggctcagatgcttttactagctcttgctagtatgtgatgtaggtctctttcgacatcattccatcaaaatcatatgattagcccataccaaacatttctataccattcagagaccagaatagtcttttctaatagaaaaaaggaaaatagagtgggccgacgacgacacaaattactgcgtggaccagaaaatagtgagacacggaagacaaaagaagtaaaagaggcaaggactacggcccacatgagattcggccccgccacctccggcaaccagcggccgatccaacggcagtgcatcctcaacggcgcgcgcgcgcgcgcgcgcgcacaacctcgtatatatcgccgcgcggaagcggcgcgaccgaggaagccttgtcctcgacaccccctacacaggtgtcgcgctgcccccgacacgagtcccgcatgcgtcccacgcggccgcgccagatcccgcctccgcgcgttgccacgccctctataaacacccagctctctccctcgccctcatctatcgcactcgtagtcgtagctcaagcatcagcggcaggagctctgggcagcgtgcgcacgtggggtacctagctcgctctgctagcctaccggatccaccatgagggtgttgctcgttgccctcgctctcctggctctcgctgcgagcgccaccagcgctgcgcagtccgagccggagctgaagctggagtccgtggtgatcgtgtcgcgccacggggtgcgcgccccgaccaaggccacgcagctcatgcaggacgtgaccccggacgcctggccgacctggccggtgaagctcggcgagctgaccccgcgcggcggcgagctgatcgcctacctcggccactactggcgccagcgcctcgtggccgacggcctcctcccgaagtgcggctgcccgcagtccggccaggtggcgatcatcgccgacgtggacgagcgcacccgcaagacgggcgaggccttcgccgccggcctcgccccggactgcgccatcaccgtgcacacccaggccgacacctcctccccggacccgctcttcaacccgctcaagaccggcgtgtgccagctcgacaacgccaacgtgaccgacgccatcctggagcgcgccggcggctccatcgccgacttcaccggccactaccagaccgccttccgcgagctggagcgcgtgctcaacttcccgcagtcgaacctctgcctcaagcgcgagaagcaggacgagtcctgctccctcacccaggccctcccgtccgagctgaaggtgtccgccgactgcgtgtccctcaccggcgccgtgtccctcgcctccatgctcaccgaaatcttcctcctccagcaggcccagggcatgccggagccgggctggggccgcatcaccgactcccaccagtggaacaccctcctctccctccacaacgcccagttcgacctcctccagcgcaccccggaggtggcccgctcccgcgccaccccgctcctcgacctcatcaagaccgccctcaccccgcacccgccgcagaagcaggcctacggcgtgaccctcccgacctcggtgctcttcatcgccggccacgacaccaacctcgccaacctcggcggcgccctggagctgaactggaccctcccgggccagccggacaacaccccgccgggcggcgagctggtgttcgagcgctggcgccgcctctccgacaactcccagtggattcaggtgtccctcgtgttccagaccctccagcagatgcgcgacaagaccccgctctccctcaacaccccgccgggcgaggtgaagctcaccctggccggctgcgaggagcgcaacgcgcagggcatgtgctccctcgccggcttcacccagatcgtgaacgaggcccgcatcccggcctgctccctctccgagaaggacgagctgtaacctaggtccccgaatttccccgatcgttcaaacatttggcaataaagtttcttaagattgaatcctgttgccggtcttgcgatgattatcatataatttctgttgaattacgttaagcatgtaataattaacatgtaatgcatgacgttatttatgagatgggtttttatgattagagtcccgcaattatacatttaatacgcgatagaaaacaaaatatagcgcgcaaactaggataaattatcgcgcgcggtgtcatctatgttactagatcgggaattggcgatcgcttcatgtctaactcgagttactggtacgtaccaaatccatggaatcaaggtacctccatgctgtcctactacttgcttcatccccttctacattttgttctggtttttggcctgcatttcggatcatgatgtatgtgatttccaatctgctgcaatatgaatggagactctgtgctaaccatcaacaacatgaaatgcttatgaggcctttgctgagcagccaatcttgcctgtgtttatgtcttcacaggccgaattcctctgttttgtttttcaccctcaatatttggaaacatttatctaggttgtttgtgtccaggcctataaatcatacatgatgttgtcgtattggatgtgaatgtggtggcgtgttcagtgccttggatttgagtttgatgagagttgcttctgggtcaccactcaccattatcgatgctcctcttcagcataaggtaaaagtcttccctgtttacgttattttacccactatggttgcttgggttggttttttcctgattgcttatgccatggaaagtcatttgatatgttgaacttgaattaactgtagaattgtatacatgttccatttgtgttgtacttccttcttttctattagtagcctcagatgagtgtgaaaaaaacagattatataacttgccctataaatcatttgaaaaaaatattgtacagtgagaaattgatatatagtgaatttttaagagcatgttttcctaaagaagtatatattttctatgtacaaaggccattgaagtaattgtagatacaggataatgtagactttttggacttacactgctacctttaagtaacaatcatgagcaatagtgttgcaatgatatttaggctgcattcgtttactctcttgatttccatgagcacgcttcccaaactgttaaactctgtgttttttgccaaaaaaaaatgcataggaaagttgcttttaaaaaatcatatcaatccattttttaagttatagctaatacttaattaatcatgcgctaataagtcactctgtttttcgtactagagagattgttttgaaccagcactcaagaacacagccttaacccagccaaataatgctacaacctaccagtccacacctcttgtaaagcatttgttgcatggaaaagctaagatgacagcaacctgttcaggaaaacaactgacaaggtcatagggagagggagcttttggaaaggtgccgtgcagttcaaacaattagttagcagtagggtgttggtttttgctcacagcaataagaagttaatcatggtgtaggcaacccaaataaaacaccaaaatatgcacaaggcagtttgttgtattctgtagtacagacaaaactaaaagtaatgaaagaagatgtggtgttagaaaaggaaacaatatcatgagtaatgtgtgggcattatgggaccacgaaataaaaagaacattttgatgagtcgtgtatcctcgatgagcctcaaaagttctctcaccccggataagaaacccttaagcaatgtgcaaagtttgcattctccactgacataatgcaaaataagatatcatcgatgacatagcaactcatgcatcatatcatgcctctctcaacctattcattcctactcatctacataagtatcttcagctaaatgttagaacataaacccataagtcacgtttgatgagtattaggcgtgacacatgacaaatcacagactcaagcaagataaagcaaaatgatgtgtacataaaactccagagctatatgtcatattgcaaaaagaggagagcttataagacaaggcatgactcacaaaaattcatttgcctttcgtgtcaaaaagaggagggctttacattatccatgtcatattgcaaaagaaagagagaaagaacaacacaatgctgcgtcaattatacatatctgtatgtccatcattattcatccacctttcgtgtaccacacttcatatatcatgagtcacttcatgtctggacattaacaaactctatcttaacatttagatgcaagagcctttatctcactataaatgcacgatgatttctcattgtttctcacaaaaagcattcagttcattagtcctacaacaacggatccaccatgagggtgttgctcgttgccctcgctctcctggctctcgctgcgagcgccaccagcgctgcgcagtccgagccggagctgaagctggagtccgtggtgatcgtgtcgcgccacggggtgcgcgccccgaccaaggccacgcagctcatgcaggacgtgaccccggacgcctggccgacctggccggtgaagctcggcgagctgaccccgcgcggcggcgagctgatcgcctacctcggccactactggcgccagcgcctcgtggccgacggcctcctcccgaagtgcggctgcccgcagtccggccaggtggcgatcatcgccgacgtggacgagcgcacccgcaagacgggcgaggccttcgccgccggcctcgccccggactgcgccatcaccgtgcacacccaggccgacacctcctccccggacccgctcttcaacccgctcaagaccggcgtgtgccagctcgacaacgccaacgtgaccgacgccatcctggagcgcgccggcggctccatcgccgacttcaccggccactaccagaccgccttccgcgagctggagcgcgtgctcaacttcccgcagtcgaacctctgcctcaagcgcgagaagcaggacgagtcctgctccctcacccaggccctcccgtccgagctgaaggtgtccgccgactgcgtgtccctcaccggcgccgtgtccctcgcctccatgctcaccgaaatcttcctcctccagcaggcccagggcatgccggagccgggctggggccgcatcaccgactcccaccagtggaacaccctcctctccctccacaacgcccagttcgacctcctccagcgcaccccggaggtggcccgctcccgcgccaccccgctcctcgacctcatcaagaccgccctcaccccgcacccgccgcagaagcaggcctacggcgtgaccctcccgacctcggtgctcttcatcgccggccacgacaccaacctcgccaacctcggcggcgccctggagctgaactggaccctcccgggccagccggacaacaccccgccgggcggcgagctggtgttcgagcgctggcgccgcctctccgacaactcccagtggattcaggtgtccctcgtgttccagaccctccagcagatgcgcgacaagaccccgctctccctcaacaccccgccgggcgaggtgaagctcaccctggccggctgcgaggagcgcaacgcgcagggcatgtgctccctcgccggcttcacccagatcgtgaacgaggcccgcatcccggcctgctccctctccgagaaggacgagctgtaacctaggctgcacaaagtggagtagtcagtcatcgatcaggaaccagacaccagacttttattcatacagtgaagtgaagtgaagtgcagtgcagtgagttgctggtttttgtacaacttagtatgtatttgtatttgtaaaatacttctatcaataaaatttctaattcctaaaaccaaaatccag

SEQ ID NO: 91 - DNA, 10279 bp, Artificial Sequence
  Synthetic construct, pAG4821
aaagtaatcatattattttatgtgtgaatcttctttactttttcatttgattatgattatgaaggtatgaccttcataaccttcgtccgaaatccattatatccaaaggaaaataatgcttcgaaggacgaaggattttgatatttaacattttatgttgccttgttcttaattcatagcatttgagaacaagtccccaacaccaatctttatctttactatattaaagcaccagttcaacgatcgtctcgtgtcaatattattaaaaaactcctacatttctttataatcaacccgcactcttataatctcttctcttactactataataagagagtttatgtacaaaataaggtgaaattatgtataagtgttctggaccttggttgttggctcatattcacacaacctaatcaatagaaaacatatgttttattaaaacaaaatttatcatatatatatatatatatatatatatatatatatatatatataatataaaccgtagcaatgcacaggcatatgactagtggcaacttaataccatgtgtgtattaagatgaataagaggtatccaaataaataacttgttcgcttacgtctggatcgaaaggggttggaaacgattaaatctcttcctagtcaaaattaaatagaaggagatttaatcgatttctcccaatccccttcgatccaggtgcaaccgaataagtccttaaatgttgaggaacacgaaacaaccatgcattggcatgtaaagctccaagaattcgttgtatccttaacaactcacagaacatcaaccaaaattgcacgtcaagggtattgggtaagaaacaatcaaacaaatcctctctgtgtgcaaagaaacacggtgagtcatgccgagatcatactcatctgatatacatgcttacagctcacaagacattacaaacaactcatattgcattacaaagatcgtttcatgaaaaataaaataggccggaacaggacaaaaatccttgacgtgtaaagtaaatttacaacaaaaaaaaagccatatgtcaagctaaatctaattcgttttacgtagatcaacaacctgtagaaggcaacaaaactgagccacgcagaagtacagaatgattccagatgaaccatcgacgtgctacgtaaagagagtgacgagtcatatacatttggcaagaaaccatgaagctgcctacagccgtctcggtggcataagaacacaagaaattgtgttaattaatcaaagctataaataacgctcgcatgcctgtgcacttctccatcaccaccactgggtcttcagaccattagctttatctactccagagcgcagaagaacccgatcgacaccggatcctaaaccatgcgcgtgctgctcgtggccctggccctgctggctcttgctgccagcgccacctctgcccagagcgagccggagctgaagctggagagcgtggtgatcgtgagcaggcacggcgtgagggccccgaccaagttcacccagctgatgcaggacgtgaccccggacgcgttctacacctggccggtgaagctgggcgagctgaccccgaggggcggcgagctgatcgcctacctgggccactactggaggcagaggctggtggccgacggcctgctgccgaagaagggctgcccgcagagcggccaggtggccatcatcgccgacgtggacgagaggaccaggaagaccggtgaggccttcgccgccggcctggccccggactgcgccatcaccgtgcacacccaggccgacaccagcagcccggacccgctgttcaacccgctgaagaccggcgtgtgccagctggacgtggcccaggtgaccgacgccatcctggagagggccggcggcagcatcgccgacttcaccggccactaccagaccgccttcagggagctggagagggtgctgaacttcccgcagagcaacctggccctgaagagggagaagcaggacgagagcgccagcctgacccaggccctgccgagcgagctgaaggtgagcgccgacaacgtgagcctgaccggcgcctggagcctggccagcatgctgaccgagattttcctgctgcagcaggcccagggcatgccggagccgggctggggcaggatcaccgacagccaccagtggaacaccctgctgagcctgcacaacgcccagttcgacctgctgcagaggaccccggaggtggccaggagcagggccaccccgctgctggacctgatcaagaccgccctgaccccgcacccgccgcagaagcaggcctacggcgtgaccctgccgaccagcgtgctgttcatcgccggccacgacaccaacctggccaacctgggcggcgccctcgagctgcagtggaccctgccgggccagccggacaacaccccgccgggcggcgagctggtgttcgagaggtggaggaggctgagcgacaacagccagtggattcaggtgagcctggtgttccagaccctgcagcagatgagggacaagaccccgctgttcctgaacaccccgccgggcgaggtgaagctgaccctggccggctgcgaggagaggaacgcccagggcatgtgcagcctggccggcttcacccagatcgtgaacgaggccaggattccggcctgcagcctgagcgagaaggacgagctgtgacctaggtccccgaatttccccgatcgttcaaacatttggcaataaagtttcttaagattgaatcctgttgccggtcttgcgatgattatcatataatttctgttgaattacgttaagcatgtaataattaacatgtaatgcatgacgttatttatgagatgggtttttatgattagagtcccgcaattatacatttaatacgcgatagaaaacaaaatatagcgcgcaaactaggataaattatcgcgcgcggtgtcatctatgttactagatcgggaattgggtacctccatgctgtcctactacttgcttcatccccttctacattttgttctggtttttggcctgcatttcggatcatgatgtatgtgatttccaatctgctgcaatatgaatggagactctgtgctaaccatcaacaacatgaaatgcttatgaggcctttgctgagcagccaatcttgcctgtgtttatgtcttcacaggccgaattcctctgttttgtttttcaccctcaatatttggaaacatttatctaggttgtttgtgtccaggcctataaatcatacatgatgttgtcgtattggatgtgaatgtggtggcgtgttcagtgccttggatttgagtttgatgagagttgcttctgggtcaccactcaccattatcgatgctcctcttcagcataaggtaaaagtcttccctgtttacgttattttacccactatggttgcttgggttggttttttcctgattgcttatgccatggaaagtcatttgatatgttgaacttgaattaactgtagaattgtatacatgttccatttgtgttgtacttccttcttttctattagtagcctcagatgagtgtgaaaaaaacagattatataacttgccctataaatcatttgaaaaaaatattgtacagtgagaaattgatatatagtgaatttttaagagcatgttttcctaaagaagtatatattttctatgtacaaaggccattgaagtaattgtagatacaggataatgtagactttttggacttacactgctacctttaagtaacaatcatgagcaatagtgttgcaatgatatttaggctgcattcgtttactctcttgatttccatgagcacgcttcccaaactgttaaactctgtgttttttgccaaaaaaaaatgcataggaaagttgcttttaaaaaatcatatcaatccattttttaagttatagctaatacttaattaatcatgcgctaataagtcactctgtttttcgtactagagagattgttttgaaccagcactcaagaacacagccttaacccagccaaataatgctacaacctaccagtccacacctcttgtaaagcatttgttgcatggaaaagctaagatgacagcaacctgttcaggaaaacaactgacaaggtcatagggagagggagcttttggaaaggtgccgtgcagttcaaacaattagttagcagtagggtgttggtttttgctcacagcaataagaagttaatcatggtgtaggcaacccaaataaaacaccaaaatatgcacaaggcagtttgttgtattctgtagtacagacaaaactaaaagtaatgaaagaagatgtggtgttagaaaaggaaacaatatcatgagtaatgtgtgggcattatgggaccacgaaataaaaagaacattttgatgagtcgtgtatcctcgatgagcctcaaaagttctctcaccccggataagaaacccttaagcaatgtgcaaagtttgcattctccactgacataatgcaaaataagatatcatcgatgacatagcaactcatgcatcatatcatgcctctctcaacctattcattcctactcatctacataagtatcttcagctaaatgttagaacataaacccataagtcacgtttgatgagtattaggcgtgacacatgacaaatcacagactcaagcaagataaagcaaaatgatgtgtacataaaactccagagctatatgtcatattgcaaaaagaggagagcttataagacaaggcatgactcacaaaaattcatttgcctttcgtgtcaaaaagaggagggctttacattatccatgtcatattgcaaaagaaagagagaaagaacaacacaatgctgcgtcaattatacatatctgtatgtccatcattattcatccacctttcgtgtaccacacttcatatatcatgagtcacttcatgtctggacattaacaaactctatcttaacatttagatgcaagagcctttatctcactataaatgcacgatgatttctcattgtttctcacaaaaagcattcagttcattagtcctacaacaacggatcctaaaccatgcgcgtgctgctcgtggccctggccctgctggctcttgctgccagcgccacctctgcccagagcgagccggagctgaagctggagagcgtggtgatcgtgagcaggcacggcgtgagggccccgaccaagttcacccagctgatgcaggacgtgaccccggacgcgttctacacctggccggtgaagctgggcgagctgaccccgaggggcggcgagctgatcgcctacctgggccactactggaggcagaggctggtggccgacggcctgctgccgaagaagggctgcccgcagagcggccaggtggccatcatcgccgacgtggacgagaggaccaggaagaccggtgaggccttcgccgccggcctggccccggactgcgccatcaccgtgcacacccaggccgacaccagcagcccggacccgctgttcaacccgctgaagaccggcgtgtgccagctggacgtggcccaggtgaccgacgccatcctggagagggccggcggcagcatcgccgacttcaccggccactaccagaccgccttcagggagctggagagggtgctgaacttcccgcagagcaacctggccctgaagagggagaagcaggacgagagcgccagcctgacccaggccctgccgagcgagctgaaggtgagcgccgacaacgtgagcctgaccggcgcctggagcctggccagcatgctgaccgagattttcctgctgcagcaggcccagggcatgccggagccgggctggggcaggatcaccgacagccaccagtggaacaccctgctgagcctgcacaacgcccagttcgacctgctgcagaggaccccggaggtggccaggagcagggccaccccgctgctggacctgatcaagaccgccctgaccccgcacccgccgcagaagcaggcctacggcgtgaccctgccgaccagcgtgctgttcatcgccggccacgacaccaacctggccaacctgggcggcgccctcgagctgcagtggaccctgccgggccagccggacaacaccccgccgggcggcgagctggtgttcgagaggtggaggaggctgagcgacaacagccagtggattcaggtgagcctggtgttccagaccctgcagcagatgagggacaagaccccgctgttcctgaacaccccgccgggcgaggtgaagctgaccctggccggctgcgaggagaggaacgcccagggcatgtgcagcctggccggcttcacccagatcgtgaacgaggccaggattccggcctgcagcctggacgagctgaaggccgaggccaagtgacctaggtccccgaatttccccgatcgttcaaacatttggcaataaagtttcttaagattgaatcctgttgccggtcttgcgatgattatcatataatttctgttgaattacgttaagcatgtaataattaacatgtaatgcatgacgttatttatgagatgggtttttatgattagagtcccgcaattatacatttaatacgcgatagaaaacaaaatatagcgcgcaaactaggataaattatcgcgcgcggtgtcatctatgttactagatcgggaattgggtaccatcaatcccgggataaaattttagtgaagctaaagcggtgaaagattatagaatttgatgtgccagattaataaatcgattaactcctaaagttcaagccgagactacagacacatgagctacataaatgagccaaggactcgagcaaagacaaatcgacacagacattataattcaagtcattctagaagattcatgagaagagtatcatttatttaaatcaatgacttgatcaaataagacctaggagctactattgataatatatatcatgggtatctagatcaagcattatgaagaagagcctaagtagaaggccccatgggctcgaccacaaacccaaggactcgacaataaagtctaggagggatcccatagctaaaaggactctagaagtgtatgtatggtaaagattttatcgagacaagaaatacgataaagatcttaacagaatcggagtcatacttgtaaaaatagagttggactcgtgtacaacttggtcttcgacttagttcggtcatgaattcagtaaccgactagatatgtaccatggaacccctagggcatgaggctatgagccataggatcatcagatccaaacatacaccaacaaatccatcacacaccgaagatccatattaacaagggattagctactttacaatttcagagtaacaaatagagccaaactcatagcacaggggaacttcatatcacaaatggaggcattgaattgatataaaaagctaaagttctaaaaagtttgaagtgctgaaacttcaaagccgctaactagtgaagcaccgaagccttccggggagagaagacatacacgacacgttagggacgtaaaatgacgaaattatacaactacctctatatgtaacacttatgtaatagaaaagacagaatccatatgaagatgtataatggatcaaccatataaatagataaacaatatatctgctatggggattggcattcttgtatccctacgcctgtatatcccctgtttagagaacctccgaaggtatatgatgctgaagattattgttgtcttgtctttcatcatatatcgagtctttccctaggatattattattcgcaatgtgcattacatggttaatcgattgagagaacatgcatctcacctttagctgataaacgataatccatgttttacacttcgtagctactcatgagtttcgatatacaaatttgttttctggactacgtaccattccatcctcttaggagaggagaggaagtgtcctcgatttaattatgttgtcattttgtagttcttcacaaaatctcaacaggtaccaaacacattgtttccacaagacatattttagtcacaacaaatctatattattattaatcactaaaactatactgaggctcagatgcttttactagctcttgctagtatgtgatgtaggtctctttcgacatcattccatcaaaatcatatgattagcccataccaaacatttctataccattcagagaccagaatagtcttttctaatagaaaaaaggaaaatagagtgggccgacgacgacacaaattactgcgtggaccagaaaatagtgagacacggaagacaaaagaagtaaaagaggcaaggactacggcccacatgagattcggccccgccacctccggcaaccagcggccgatccaacggcagtgcatcctcaacggcgcgcgcgcgcgcgcgcgcgcacaacctcgtatatatcgccgcgcggaagcggcgcgaccgaggaagccttgtcctcgacaccccctacacaggtgtcgcgctgcccccgacacgagtcccgcatgcgtcccacgcggccgcgccagatcccgcctccgcgcgttgccacgccctctataaacacccagctctctccctcgccctcatctatcgcactcgtagtcgtagctcaagcatcagcggcaggagctctgggcagcgtgcgcacgtggggtacctagctcgctctgctagcctaccggatcctaaaccatgcgcgtgctgctcgtggccctggccctgctggctcttgctgccagcgccacctctgcccagagcgagccggagctgaagctggagagcgtggtgatcgtgagcaggcacggcgtgagggccccgaccaagttcacccagctgatgcaggacgtgaccccggacgcgttctacacctggccggtgaagctgggcgagctgaccccgaggggcggcgagctgatcgcctacctgggccactactggaggcagaggctggtggccgacggcctgctgccgaagaagggctgcccgcagagcggccaggtggccatcatcgccgacgtggacgagaggaccaggaagaccggtgaggccttcgccgccggcctggccccggactgcgccatcaccgtgcacacccaggccgacaccagcagcccggacccgctgttcaacccgctgaagaccggcgtgtgccagctggacgtggcccaggtgaccgacgccatcctggagagggccggcggcagcatcgccgacttcaccggccactaccagaccgccttcagggagctggagagggtgctgaacttcccgcagagcaacctggccctgaagagggagaagcaggacgagagcgccagcctgacccaggccctgccgagcgagctgaaggtgagcgccgacaacgtgagcctgaccggcgcctggagcctggccagcatgctgaccgagattttcctgctgcagcaggcccagggcatgccggagccgggctggggcaggatcaccgacagccaccagtggaacaccctgctgagcctgcacaacgcccagttcgacctgctgcagaggaccccggaggtggccaggagcagggccaccccgctgctggacctgatcaagaccgccctgaccccgcacccgccgcagaagcaggcctacggcgtgaccctgccgaccagcgtgctgttcatcgccggccacgacaccaacctggccaacctgggcggcgccctcgagctgcagtggaccctgccgggccagccggacaacaccccgccgggcggcgagctggtgttcgagaggtggaggaggctgagcgacaacagccagtggattcaggtgagcctggtgttccagaccctgcagcagatgagggacaagaccccgctgttcctgaacaccccgccgggcgaggtgaagctgaccctggccggctgcgaggagaggaacgcccagggcatgtgcagcctggccggcttcacccagatcgtgaacgaggccaggattccggcctgcagcctgagcgagaaggacgagctgtgacctaggtccccgaatttccccgatcgttcaaacatttggcaataaagtttcttaagattgaatcctgttgccggtcttgcgatgattatcatataatttctgttgaattacgttaagcatgtaataattaacatgtaatgcatgacgttatttatgagatgggtttttatgattagagtcccgcaattatacatttaatacgcgatagaaaacaaaatatagcgcgcaaactaggataaattatcgcgcgcggtgtcatctatgttactagatcgggaattg

SEQ ID NO: 92 - DNA, 10279 bp, Artificial Sequence
  Synthetic construct, pAG4822
aaagtaatcatattattttatgtgtgaatcttctttactttttcatttgattatgattatgaaggtatgaccttcataaccttcgtccgaaatccattatatccaaaggaaaataatgcttcgaaggacgaaggattttgatatttaacattttatgttgccttgttcttaattcatagcatttgagaacaagtccccaacaccaatctttatctttactatattaaagcaccagttcaacgatcgtctcgtgtcaatattattaaaaaactcctacatttctttataatcaacccgcactcttataatctcttctcttactactataataagagagtttatgtacaaaataaggtgaaattatgtataagtgttctggaccttggttgttggctcatattcacacaacctaatcaatagaaaacatatgttttattaaaacaaaatttatcatatatatatatatatatatatatatatatatatatatatataatataaaccgtagcaatgcacaggcatatgactagtggcaacttaataccatgtgtgtattaagatgaataagaggtatccaaataaataacttgttcgcttacgtctggatcgaaaggggttggaaacgattaaatctcttcctagtcaaaattaaatagaaggagatttaatcgatttctcccaatccccttcgatccaggtgcaaccgaataagtccttaaatgttgaggaacacgaaacaaccatgcattggcatgtaaagctccaagaattcgttgtatccttaacaactcacagaacatcaaccaaaattgcacgtcaagggtattgggtaagaaacaatcaaacaaatcctctctgtgtgcaaagaaacacggtgagtcatgccgagatcatactcatctgatatacatgcttacagctcacaagacattacaaacaactcatattgcattacaaagatcgtttcatgaaaaataaaataggccggaacaggacaaaaatccttgacgtgtaaagtaaatttacaacaaaaaaaaagccatatgtcaagctaaatctaattcgttttacgtagatcaacaacctgtagaaggcaacaaaactgagccacgcagaagtacagaatgattccagatgaaccatcgacgtgctacgtaaagagagtgacgagtcatatacatttggcaagaaaccatgaagctgcctacagccgtctcggtggcataagaacacaagaaattgtgttaattaatcaaagctataaataacgctcgcatgcctgtgcacttctccatcaccaccactgggtcttcagaccattagctttatctactccagagcgcagaagaacccgatcgacaccggatcctaaaccatgcgcgtgctgctcgtggccctggccctgctggctcttgctgccagcgccacctctgcccagagcgagccggagctgaagctggagagcgtggtgatcgtgagcaggcacggcgtgagggccccgaccaaggccacccagctgatgcaggacgtgaccccggacgcgttctacacctggccggtgaagctgggcgagctgaccccgaggggcggcgagctgatcgcctacctgggccactactggaggcagaggctggtggccgacggcctgctgccgaagaagggctgcccgcagagcggccaggtggccatcatcgccgacgtggacgagaggaccaggaagaccggcgaggccttcgccgccggcctggccccggactgcgccatcaccgtgcacacccaggccgacaccagcagcccggacccgctgttcaacccgctgaagaccggcgtgtgccagctggacaacgcccaggtgaccgacgccatcctggagagggccggcggcagcatcgccgacttcaccggccactaccagaccgccttcagggagctggagagggtgctgaacttcccgcagagcaacctgtgcctgaagagggagaagcaggacgagagctgcagcctgacccaggccctgccgagcgagctgaaggtgagcgccgacaacgtgagcctgaccggcgccgtgagcctggccagcatgctgaccgagattttcctgctgcagcaggcccagggcatgccggagccgggctggggcaggatcaccgacagccaccagtggaacaccctgctgagcctgcacaacgcccagttcgacctgctgcagaggaccccggaggtggccaggagcagggccaccccgctgctggacctgatcaagaccgccctgaccccgcacccgccgcagaagcaggcctacggcgtgaccctgccgaccagcgtgctgttcatcgccggccacgacaccaacctggccaacctgggcggcgccctcgagctgcagtggaccctgccgggccagccggacaacaccccgccgggcggcgagctggtgttcgagaggtggaggaggctgagcgacaacagccagtggattcaggtgagcctggtgttccagaccctgcagcagatgagggacaagaccccgctgtccctgaacaccccgccgggcgaggtgaagctgaccctggccggctgcgaggagaggaacgcccagggcatgtgcagcctggccggcttcacccagatcgtgaacgaggccaggattccggcctgcagcctgagcgagaaggacgagctgtgacctaggtccccgaatttccccgatcgttcaaacatttggcaataaagtttcttaagattgaatcctgttgccggtcttgcgatgattatcatataatttctgttgaattacgttaagcatgtaataattaacatgtaatgcatgacgttatttatgagatgggtttttatgattagagtcccgcaattatacatttaatacgcgatagaaaacaaaatatagcgcgcaaactaggataaattatcgcgcgcggtgtcatctatgttactagatcgggaattgggtacctccatgctgtcctactacttgcttcatccccttctacattttgttctggtttttggcctgcatttcggatcatgatgtatgtgatttccaatctgctgcaatatgaatggagactctgtgctaaccatcaacaacatgaaatgcttatgaggcctttgctgagcagccaatcttgcctgtgtttatgtcttcacaggccgaattcctctgttttgtttttcaccctcaatatttggaaacatttatctaggttgtttgtgtccaggcctataaatcatacatgatgttgtcgtattggatgtgaatgtggtggcgtgttcagtgccttggatttgagtttgatgagagttgcttctgggtcaccactcaccattatcgatgctcctcttcagcataaggtaaaagtcttccctgtttacgttattttacccactatggttgcttgggttggttttttcctgattgcttatgccatggaaagtcatttgatatgttgaacttgaattaactgtagaattgtatacatgttccatttgtgttgtacttccttcttttctattagtagcctcagatgagtgtgaaaaaaacagattatataacttgccctataaatcatttgaaaaaaatattgtacagtgagaaattgatatatagtgaatttttaagagcatgttttcctaaagaagtatatattttctatgtacaaaggccattgaagtaattgtagatacaggataatgtagactttttggacttacactgctacctttaagtaacaatcatgagcaatagtgttgcaatgatatttaggctgcattcgtttactctcttgatttccatgagcacgcttcccaaactgttaaactctgtgttttttgccaaaaaaaaatgcataggaaagttgcttttaaaaaatcatatcaatccattttttaagttatagctaatacttaattaatcatgcgctaataagtcactctgtttttcgtactagagagattgttttgaaccagcactcaagaacacagccttaacccagccaaataatgctacaacctaccagtccacacctcttgtaaagcatttgttgcatggaaaagctaagatgacagcaacctgttcaggaaaacaactgacaaggtcatagggagagggagcttttggaaaggtgccgtgcagttcaaacaattagttagcagtagggtgttggtttttgctcacagcaataagaagttaatcatggtgtaggcaacccaaataaaacaccaaaatatgcacaaggcagtttgttgtattctgtagtacagacaaaactaaaagtaatgaaagaagatgtggtgttagaaaaggaaacaatatcatgagtaatgtgtgggcattatgggaccacgaaataaaaagaacattttgatgagtcgtgtatcctcgatgagcctcaaaagttctctcaccccggataagaaacccttaagcaatgtgcaaagtttgcattctccactgacataatgcaaaataagatatcatcgatgacatagcaactcatgcatcatatcatgcctctctcaacctattcattcctactcatctacataagtatcttcagctaaatgttagaacataaacccataagtcacgtttgatgagtattaggcgtgacacatgacaaatcacagactcaagcaagataaagcaaaatgatgtgtacataaaactccagagctatatgtcatattgcaaaaagaggagagcttataagacaaggcatgactcacaaaaattcatttgcctttcgtgtcaaaaagaggagggctttacattatccatgtcatattgcaaaagaaagagagaaagaacaacacaatgctgcgtcaattatacatatctgtatgtccatcattattcatccacctttcgtgtaccacacttcatatatcatgagtcacttcatgtctggacattaacaaactctatcttaacatttagatgcaagagcctttatctcactataaatgcacgatgatttctcattgtttctcacaaaaagcattcagttcattagtcctacaacaacggatcctaaaccatgcgcgtgctgctcgtggccctggccctgctggctcttgctgccagcgccacctctgcccagagcgagccggagctgaagctggagagcgtggtgatcgtgagcaggcacggcgtgagggccccgaccaaggccacccagctgatgcaggacgtgaccccggacgcgttctacacctggccggtgaagctgggcgagctgaccccgaggggcggcgagctgatcgcctacctgggccactactggaggcagaggctggtggccgacggcctgctgccgaagaagggctgcccgcagagcggccaggtggccatcatcgccgacgtggacgagaggaccaggaagaccggcgaggccttcgccgccggcctggccccggactgcgccatcaccgtgcacacccaggccgacaccagcagcccggacccgctgttcaacccgctgaagaccggcgtgtgccagctggacaacgcccaggtgaccgacgccatcctggagagggccggcggcagcatcgccgacttcaccggccactaccagaccgccttcagggagctggagagggtgctgaacttcccgcagagcaacctgtgcctgaagagggagaagcaggacgagagctgcagcctgacccaggccctgccgagcgagctgaaggtgagcgccgacaacgtgagcctgaccggcgccgtgagcctggccagcatgctgaccgagattttcctgctgcagcaggcccagggcatgccggagccgggctggggcaggatcaccgacagccaccagtggaacaccctgctgagcctgcacaacgcccagttcgacctgctgcagaggaccccggaggtggccaggagcagggccaccccgctgctggacctgatcaagaccgccctgaccccgcacccgccgcagaagcaggcctacggcgtgaccctgccgaccagcgtgctgttcatcgccggccacgacaccaacctggccaacctgggcggcgccctcgagctgcagtggaccctgccgggccagccggacaacaccccgccgggcggcgagctggtgttcgagaggtggaggaggctgagcgacaacagccagtggattcaggtgagcctggtgttccagaccctgcagcagatgagggacaagaccccgctgtccctgaacaccccgccgggcgaggtgaagctgaccctggccggctgcgaggagaggaacgcccagggcatgtgcagcctggccggcttcacccagatcgtgaacgaggccaggattccggcctgcagcctggacgagctgaaggccgaggccaagtgacctaggtccccgaatttccccgatcgttcaaacatttggcaataaagtttcttaagattgaatcctgttgccggtcttgcgatgattatcatataatttctgttgaattacgttaagcatgtaataattaacatgtaatgcatgacgttatttatgagatgggtttttatgattagagtcccgcaattatacatttaatacgcgatagaaaacaaaatatagcgcgcaaactaggataaattatcgcgcgcggtgtcatctatgttactagatcgggaattgggtaccatcaatcccgggataaaattttagtgaagctaaagcggtgaaagattatagaatttgatgtgccagattaataaatcgattaactcctaaagttcaagccgagactacagacacatgagctacataaatgagccaaggactcgagcaaagacaaatcgacacagacattataattcaagtcattctagaagattcatgagaagagtatcatttatttaaatcaatgacttgatcaaataagacctaggagctactattgataatatatatcatgggtatctagatcaagcattatgaagaagagcctaagtagaaggccccatgggctcgaccacaaacccaaggactcgacaataaagtctaggagggatcccatagctaaaaggactctagaagtgtatgtatggtaaagattttatcgagacaagaaatacgataaagatcttaacagaatcggagtcatacttgtaaaaatagagttggactcgtgtacaacttggtcttcgacttagttcggtcatgaattcagtaaccgactagatatgtaccatggaacccctagggcatgaggctatgagccataggatcatcagatccaaacatacaccaacaaatccatcacacaccgaagatccatattaacaagggattagctactttacaatttcagagtaacaaatagagccaaactcatagcacaggggaacttcatatcacaaatggaggcattgaattgatataaaaagctaaagttctaaaaagtttgaagtgctgaaacttcaaagccgctaactagtgaagcaccgaagccttccggggagagaagacatacacgacacgttagggacgtaaaatgacgaaattatacaactacctctatatgtaacacttatgtaatagaaaagacagaatccatatgaagatgtataatggatcaaccatataaatagataaacaatatatctgctatggggattggcattcttgtatccctacgcctgtatatcccctgtttagagaacctccgaaggtatatgatgctgaagattattgttgtcttgtctttcatcatatatcgagtctttccctaggatattattattcgcaatgtgcattacatggttaatcgattgagagaacatgcatctcacctttagctgataaacgataatccatgttttacacttcgtagctactcatgagtttcgatatacaaatttgttttctggactacgtaccattccatcctcttaggagaggagaggaagtgtcctcgatttaattatgttgtcattttgtagttcttcacaaaatctcaacaggtaccaaacacattgtttccacaagacatattttagtcacaacaaatctatattattattaatcactaaaactatactgaggctcagatgcttttactagctcttgctagtatgtgatgtaggtctctttcgacatcattccatcaaaatcatatgattagcccataccaaacatttctataccattcagagaccagaatagtcttttctaatagaaaaaaggaaaatagagtgggccgacgacgacacaaattactgcgtggaccagaaaatagtgagacacggaagacaaaagaagtaaaagaggcaaggactacggcccacatgagattcggccccgccacctccggcaaccagcggccgatccaacggcagtgcatcctcaacggcgcgcgcgcgcgcgcgcgcgcacaacctcgtatatatcgccgcgcggaagcggcgcgaccgaggaagccttgtcctcgacaccccctacacaggtgtcgcgctgcccccgacacgagtcccgcatgcgtcccacgcggccgcgccagatcccgcctccgcgcgttgccacgccctctataaacacccagctctctccctcgccctcatctatcgcactcgtagtcgtagctcaagcatcagcggcaggagctctgggcagcgtgcgcacgtggggtacctagctcgctctgctagcctaccggatcctaaaccatgcgcgtgctgctcgtggccctggccctgctggctcttgctgccagcgccacctctgcccagagcgagccggagctgaagctggagagcgtggtgatcgtgagcaggcacggcgtgagggccccgaccaaggccacccagctgatgcaggacgtgaccccggacgcgttctacacctggccggtgaagctgggcgagctgaccccgaggggcggcgagctgatcgcctacctgggccactactggaggcagaggctggtggccgacggcctgctgccgaagaagggctgcccgcagagcggccaggtggccatcatcgccgacgtggacgagaggaccaggaagaccggcgaggccttcgccgccggcctggccccggactgcgccatcaccgtgcacacccaggccgacaccagcagcccggacccgctgttcaacccgctgaagaccggcgtgtgccagctggacaacgcccaggtgaccgacgccatcctggagagggccggcggcagcatcgccgacttcaccggccactaccagaccgccttcagggagctggagagggtgctgaacttcccgcagagcaacctgtgcctgaagagggagaagcaggacgagagctgcagcctgacccaggccctgccgagcgagctgaaggtgagcgccgacaacgtgagcctgaccggcgccgtgagcctggccagcatgctgaccgagattttcctgctgcagcaggcccagggcatgccggagccgggctggggcaggatcaccgacagccaccagtggaacaccctgctgagcctgcacaacgcccagttcgacctgctgcagaggaccccggaggtggccaggagcagggccaccccgctgctggacctgatcaagaccgccctgaccccgcacccgccgcagaagcaggcctacggcgtgaccctgccgaccagcgtgctgttcatcgccggccacgacaccaacctggccaacctgggcggcgccctcgagctgcagtggaccctgccgggccagccggacaacaccccgccgggcggcgagctggtgttcgagaggtggaggaggctgagcgacaacagccagtggattcaggtgagcctggtgttccagaccctgcagcagatgagggacaagaccccgctgtccctgaacaccccgccgggcgaggtgaagctgaccctggccggctgcgaggagaggaacgcccagggcatgtgcagcctggccggcttcacccagatcgtgaacgaggccaggattccggcctgcagcctgagcgagaaggacgagctgtgacctaggtccccgaatttccccgatcgttcaaacatttggcaataaagtttcttaagattgaatcctgttgccggtcttgcgatgattatcatataatttctgttgaattacgttaagcatgtaataattaacatgtaatgcatgacgttatttatgagatgggtttttatgattagagtcccgcaattatacatttaatacgcgatagaaaacaaaatatagcgcgcaaactaggataaattatcgcgcgcggtgtcatctatgttactagatcgggaattg

SEQ ID NO: 93 - DNA, 3606 bp, Artificial Sequence
  Synthetic construct, pAG4871
ctgcagtgcagcgtgacccggtcgtgcccctctctagagataatgagcattgcatgtctaagttataaaaaattaccacatattttttttgtcacacttgtttgaagtgcagtttatctatctttatacatatatttaaactttactctacgaataatataatctatagtactacaataatatcagtgttttagagaatcatataaatgaacagttagacatggtctaaaggacaattgagtattttgacaacaggactctacagttttatctttttagtgtgcatgtgttctcctttttttttgcaaatagcttcacctatataatacttcatccattttattagtacatccatttagggtttagggttaatggtttttatagactaatttttttagtacatctattttattctattttagcctctaaattaagaaaactaaaactctattttagtttttttatttaataatttagatataaaatagaataaaataaagtgactaaaaattaaacaaataccctttaagaaattaaaaaaactaaggaaacatttttcttgtttcgagtagataatgccagcctgttaaacgccgtcgacgagtctaacggacaccaaccagcgaaccagcagcgtcgcgtcgggccaagcgaagcagacggcacggcatctctgtcgctgcctctggacccctctcgagagttccgctccaccgttggacttgctccgctgtcggcatccagaaattgcgtggcggagcggcagacgtgagccggcacggcaggcggcctcctcctcctctcacggcacggcagctacgggggattcctttcccaccgctccttcgctttcccttcctcgcccgccgtaataaatagacaccccctccacaccctctttccccaacctcgtgttgttcggagcgcacacacacacaaccagatctcccccaaatccacccgtcggcacctccgcttcaaggtacgccgctcgtcctccccccccccccctctctaccttctctagatcggcgttccggtccatggttagggcccggtagttctacttctgttcatgtttgtgttagatccgtgtttgtgttagatccgtgctgctagcgttcgtacacggatgcgacctgtacgtcagacacgttctgattgctaacttgccagtgtttctctttggggaatcctgggatggctctagccgttccgcagacgggatcgatttcatgattttttttgtttcgttgcatagggtttggtttgcccttttcctttatttcaatatatgccgtgcacttgtttgtcgggtcatcttttcatgcttttttttgtcttggttgtgatgatgtggtctggttgggcggtcgttctagatcggagtagaattctgtttcaaactacctggtggatttattaattttggatctgtatgtgtgtgccatacatattcatagttacgaattgaagatgatggatggaaatatcgatctaggataggtatacatgttgatgcgggttttactgatgcatatacagagatgctttttgttcgcttggttgtgatgatgtggtgtggttgggcggtcgttcattcgttctagatcggagtagaatactgtttcaaactacctggtgtatttattaattttggaactgtatgtgtgtgtcatacatcttcatagttacgagtttaagatggatggaaatatcgatctaggataggtatacatgttgatgtgggttttactgatgcatatacatgatggcatatgcagcatctattcatatgctctaaccttgagtacctatctattataataaacaagtatgttttataattattttgatcttgatatacttggatgatggcatatgcagcagctatatgtggatttttttagccctgccttcatacgctatttatttgcttggtactgtttcttttgtcgatgctcaccctgttgtttggtgttacttctgcagatccagatcggatcctaaaccatgcgcgtgctgctcgtggccctggccctgctggctcttgctgccagcgccacctctgcccagagcgagccggagctgaagctggagagcgtggtgatcgtgagcaggcacggcgtgagggccccgaccaagttcacccagctgatgcaggacgtgaccccggacgcgttctacacctggccggtgaagctgggcgagctgaccccgaggggcggcgagctgatcgcctacctgggccactactggaggcagaggctggtggccgacggcctgctgccgaagaagggctgcccgcagagcggccaggtggccatcatcgccgacgtggacgagaggaccaggaagaccggtgaggccttcgccgccggcctggccccggactgcgccatcaccgtgcacacccaggccgacaccagcagcccggacccgctgttcaacccgctgaagaccggcgtgtgccagctggacgtggcccaggtgaccgacgccatcctggagagggccggcggcagcatcgccgacttcaccggccactaccagaccgccttcagggagctggagagggtgctgaacttcccgcagagcaacctggccctgaagagggagaagcaggacgagagcgccagcctgacccaggccctgccgagcgagctgaaggtgagcgccgacaacgtgagcctgaccggcgcctggagcctggccagcatgctgaccgagattttcctgctgcagcaggcccagggcatgccggagccgggctggggcaggatcaccgacagccaccagtggaacaccctgctgagcctgcacaacgcccagttcgacctgctgcagaggaccccggaggtggccaggagcagggccaccccgctgctggacctgatcaagaccgccctgaccccgcacccgccgcagaagcaggcctacggcgtgaccctgccgaccagcgtgctgttcatcgccggccacgacaccaacctggccaacctgggcggcgccctcgagctgcagtggaccctgccgggccagccggacaacaccccgccgggcggcgagctggtgttcgagaggtggaggaggctgagcgacaacagccagtggattcaggtgagcctggtgttccagaccctgcagcagatgagggacaagaccccgctgttcctgaacaccccgccgggcgaggtgaagctgaccctggccggctgcgaggagaggaacgcccagggcatgtgcagcctggccggcttcacccagatcgtgaacgaggccaggattccggcctgcagcctgagcgagaaggacgagctgtgacctaggtccccgaatttccccgatcgttcaaacatttggcaataaagtttcttaagattgaatcctgttgccggtcttgcgatgattatcatataatttctgttgaattacgttaagcatgtaataattaacatgtaatgcatgacgttatttatgagatgggtttttatgattagagtcccgcaattatacatttaatacgcgatagaaaacaaaatatagcgcgcaaactaggataaattatcgcgcgcggtgtcatctatgttactagatcgggaattg

SEQ ID NO: 94 - DNA, 2904 bp, Artificial Sequence
  Synthetic construct, pAG4868
tctagagatgtaatggtgttaggacacgtggttagctactaatataaatgtaaggtcaaaattcgatggtttattttctattttcaattacctagcattatctcatttctaattgtgtgataacaaatgcattagaccataattctgtaaatacgtacatttaagcacacagtctatattttaaaattcttctttttgtgtggatatcccaacccaaatccacctctctcctcaatccgtgtatcttcaccgctgccaagtgccaacaacacatcgcatcgtgcaaatctttgttggtttgtgcacggtcggcgccaatggaggagacacctgtacggtgcccttggtagaacaacatccttatccctatatgtatggtgcccttcgtagaatggcaccccttatccctacaatagccatgtatgcataccaagaattaaatatactttttcttgaaccacaataatttattatagcggcacttcttgttctggttgaacacttatttggaacaataaaatcccgagttcctaaccacaggttcactttttttccttatcctcctaggaaactaaattttaaattcataaatttaattgaaatgttaatgaaaacaaaaaaattatctacaaagacgactcttagccacagccgcctcactgcaccctcaaccacatcctgcaaacagacaccctcgccacatccctccagattcttccctccgatgcagcctacttgctaacagacgccctctccacatcctgcaaagcattcctccaaattcttgcgatcccccgaatccagcattaactgctaagggacgccctctccacatcctgctacccaattagccaacggaataacacaagaaggcaggtgagcagtgacaaagcacgtcaacagcaccgagccaagccaaaaaggagcaaggaggagcaagcccaagccgcagccgcagctctccaggtccccttgcgattgccgccagcagtagcagacacccctctccacatcccctccggccgctaacagcagcaagccaagccaaaaagaagcctcagccacagccggttccgttgcggttaccgccgatcacatgcccaaggccgcgcctttccaaacgccgagggccgcccgttcccgtgcacagccacacacacacccgcccgccaacgactccccatccctatttgaacccacccgcgcactgcattgatcaccaatcgcatcgcagcagcacgagcagcacgccgtgccgctccaaccgtctcgcttccctgcttagcttcccgccgcgccggatcctaaaccatgcgcgtgctgctcgtggccctggccctgctggctcttgctgccagcgccacctctgcccagagcgagccggagctgaagctggagagcgtggtgatcgtgagcaggcacggcgtgagggccccgaccaagttcacccagctgatgcaggacgtgaccccggacgcgttctacacctggccggtgaagctgggcgagctgaccccgaggggcggcgagctgatcgcctacctgggccactactggaggcagaggctggtggccgacggcctgctgccgaagaagggctgcccgcagagcggccaggtggccatcatcgccgacgtggacgagaggaccaggaagaccggtgaggccttcgccgccggcctggccccggactgcgccatcaccgtgcacacccaggccgacaccagcagcccggacccgctgttcaacccgctgaagaccggcgtgtgccagctggacgtggcccaggtgaccgacgccatcctggagagggccggcggcagcatcgccgacttcaccggccactaccagaccgccttcagggagctggagagggtgctgaacttcccgcagagcaacctggccctgaagagggagaagcaggacgagagcgccagcctgacccaggccctgccgagcgagctgaaggtgagcgccgacaacgtgagcctgaccggcgcctggagcctggccagcatgctgaccgagattttcctgctgcagcaggcccagggcatgccggagccgggctggggcaggatcaccgacagccaccagtggaacaccctgctgagcctgcacaacgcccagttcgacctgctgcagaggaccccggaggtggccaggagcagggccaccccgctgctggacctgatcaagaccgccctgaccccgcacccgccgcagaagcaggcctacggcgtgaccctgccgaccagcgtgctgttcatcgccggccacgacaccaacctggccaacctgggcggcgccctcgagctgcagtggaccctgccgggccagccggacaacaccccgccgggcggcgagctggtgttcgagaggtggaggaggctgagcgacaacagccagtggattcaggtgagcctggtgttccagaccctgcagcagatgagggacaagaccccgctgttcctgaacaccccgccgggcgaggtgaagctgaccctggccggctgcgaggagaggaacgcccagggcatgtgcagcctggccggcttcacccagatcgtgaacgaggccaggattccggcctgcagcctgagcgagaaggacgagctgtgacctaggtccccgaatttccccgatcgttcaaacatttggcaataaagtttcttaagattgaatcctgttgccggtcttgcgatgattatcatataatttctgttgaattacgttaagcatgtaataattaacatgtaatgcatgacgttatttatgagatgggtttttatgattagagtcccgcaattatacatttaatacgcgatagaaaacaaaatatagcgcgcaaactaggataaattatcgcgcgcggtgtcatctatgttactagatcgggaattg

SEQ ID NO: 95 - DNA, 3606 bp, Artificial Sequence
  Synthetic construct, pAG4872
ctgcagtgcagcgtgacccggtcgtgcccctctctagagataatgagcattgcatgtctaagttataaaaaattaccacatattttttttgtcacacttgtttgaagtgcagtttatctatctttatacatatatttaaactttactctacgaataatataatctatagtactacaataatatcagtgttttagagaatcatataaatgaacagttagacatggtctaaaggacaattgagtattttgacaacaggactctacagttttatctttttagtgtgcatgtgttctcctttttttttgcaaatagcttcacctatataatacttcatccattttattagtacatccatttagggtttagggttaatggtttttatagactaatttttttagtacatctattttattctattttagcctctaaattaagaaaactaaaactctattttagtttttttatttaataatttagatataaaatagaataaaataaagtgactaaaaattaaacaaataccctttaagaaattaaaaaaactaaggaaacatttttcttgtttcgagtagataatgccagcctgttaaacgccgtcgacgagtctaacggacaccaaccagcgaaccagcagcgtcgcgtcgggccaagcgaagcagacggcacggcatctctgtcgctgcctctggacccctctcgagagttccgctccaccgttggacttgctccgctgtcggcatccagaaattgcgtggcggagcggcagacgtgagccggcacggcaggcggcctcctcctcctctcacggcacggcagctacgggggattcctttcccaccgctccttcgctttcccttcctcgcccgccgtaataaatagacaccccctccacaccctctttccccaacctcgtgttgttcggagcgcacacacacacaaccagatctcccccaaatccacccgtcggcacctccgcttcaaggtacgccgctcgtcctccccccccccccctctctaccttctctagatcggcgttccggtccatggttagggcccggtagttctacttctgttcatgtttgtgttagatccgtgtttgtgttagatccgtgctgctagcgttcgtacacggatgcgacctgtacgtcagacacgttctgattgctaacttgccagtgtttctctttggggaatcctgggatggctctagccgttccgcagacgggatcgatttcatgattttttttgtttcgttgcatagggtttggtttgcccttttcctttatttcaatatatgccgtgcacttgtttgtcgggtcatcttttcatgcttttttttgtcttggttgtgatgatgtggtctggttgggcggtcgttctagatcggagtagaattctgtttcaaactacctggtggatttattaattttggatctgtatgtgtgtgccatacatattcatagttacgaattgaagatgatggatggaaatatcgatctaggataggtatacatgttgatgcgggttttactgatgcatatacagagatgctttttgttcgcttggttgtgatgatgtggtgtggttgggcggtcgttcattcgttctagatcggagtagaatactgtttcaaactacctggtgtatttattaattttggaactgtatgtgtgtgtcatacatcttcatagttacgagtttaagatggatggaaatatcgatctaggataggtatacatgttgatgtgggttttactgatgcatatacatgatggcatatgcagcatctattcatatgctctaaccttgagtacctatctattataataaacaagtatgttttataattattttgatcttgatatacttggatgatggcatatgcagcagctatatgtggatttttttagccctgccttcatacgctatttatttgcttggtactgtttcttttgtcgatgctcaccctgttgtttggtgttacttctgcagatccagatcggatcctaaaccatgcgcgtgctgctcgtggccctggccctgctggctcttgctgccagcgccacctctgcccagagcgagccggagctgaagctggagagcgtggtgatcgtgagcaggcacggcgtgagggccccgaccaaggccacccagctgatgcaggacgtgaccccggacgcgttctacacctggccggtgaagctgggcgagctgaccccgaggggcggcgagctgatcgcctacctgggccactactggaggcagaggctggtggccgacggcctgctgccgaagaagggctgcccgcagagcggccaggtggccatcatcgccgacgtggacgagaggaccaggaagaccggcgaggccttcgccgccggcctggccccggactgcgccatcaccgtgcacacccaggccgacaccagcagcccggacccgctgttcaacccgctgaagaccggcgtgtgccagctggacaacgcccaggtgaccgacgccatcctggagagggccggcggcagcatcgccgacttcaccggccactaccagaccgccttcagggagctggagagggtgctgaacttcccgcagagcaacctgtgcctgaagagggagaagcaggacgagagctgcagcctgacccaggccctgccgagcgagctgaaggtgagcgccgacaacgtgagcctgaccggcgccgtgagcctggccagcatgctgaccgagattttcctgctgcagcaggcccagggcatgccggagccgggctggggcaggatcaccgacagccaccagtggaacaccctgctgagcctgcacaacgcccagttcgacctgctgcagaggaccccggaggtggccaggagcagggccaccccgctgctggacctgatcaagaccgccctgaccccgcacccgccgcagaagcaggcctacggcgtgaccctgccgaccagcgtgctgttcatcgccggccacgacaccaacctggccaacctgggcggcgccctcgagctgcagtggaccctgccgggccagccggacaacaccccgccgggcggcgagctggtgttcgagaggtggaggaggctgagcgacaacagccagtggattcaggtgagcctggtgttccagaccctgcagcagatgagggacaagaccccgctgtccctgaacaccccgccgggcgaggtgaagctgaccctggccggctgcgaggagaggaacgcccagggcatgtgcagcctggccggcttcacccagatcgtgaacgaggccaggattccggcctgcagcctgagcgagaaggacgagctgtgacctaggtccccgaatttccccgatcgttcaaacatttggcaataaagtttcttaagattgaatcctgttgccggtcttgcgatgattatcatataatttctgttgaattacgttaagcatgtaataattaacatgtaatgcatgacgttatttatgagatgggtttttatgattagagtcccgcaattatacatttaatacgcgatagaaaacaaaatatagcgcgcaaactaggataaattatcgcgcgcggtgtcatctatgttactagatcgggaattg

SEQ ID NO: 96 - DNA, 2904 bp, Artificial Sequence
  Synthetic construct, pAG4869
tctagagatgtaatggtgttaggacacgtggttagctactaatataaatgtaaggtcaaaattcgatggtttattttctattttcaattacctagcattatctcatttctaattgtgtgataacaaatgcattagaccataattctgtaaatacgtacatttaagcacacagtctatattttaaaattcttctttttgtgtggatatcccaacccaaatccacctctctcctcaatccgtgtatcttcaccgctgccaagtgccaacaacacatcgcatcgtgcaaatctttgttggtttgtgcacggtcggcgccaatggaggagacacctgtacggtgcccttggtagaacaacatccttatccctatatgtatggtgcccttcgtagaatggcaccccttatccctacaatagccatgtatgcataccaagaattaaatatactttttcttgaaccacaataatttattatagcggcacttcttgttctggttgaacacttatttggaacaataaaatcccgagttcctaaccacaggttcactttttttccttatcctcctaggaaactaaattttaaattcataaatttaattgaaatgttaatgaaaacaaaaaaattatctacaaagacgactcttagccacagccgcctcactgcaccctcaaccacatcctgcaaacagacaccctcgccacatccctccagattcttccctccgatgcagcctacttgctaacagacgccctctccacatcctgcaaagcattcctccaaattcttgcgatcccccgaatccagcattaactgctaagggacgccctctccacatcctgctacccaattagccaacggaataacacaagaaggcaggtgagcagtgacaaagcacgtcaacagcaccgagccaagccaaaaaggagcaaggaggagcaagcccaagccgcagccgcagctctccaggtccccttgcgattgccgccagcagtagcagacacccctctccacatcccctccggccgctaacagcagcaagccaagccaaaaagaagcctcagccacagccggttccgttgcggttaccgccgatcacatgcccaaggccgcgcctttccaaacgccgagggccgcccgttcccgtgcacagccacacacacacccgcccgccaacgactccccatccctatttgaacccacccgcgcactgcattgatcaccaatcgcatcgcagcagcacgagcagcacgccgtgccgctccaaccgtctcgcttccctgcttagcttcccgccgcgccggatcctaaaccatgcgcgtgctgctcgtggccctggccctgctggctcttgctgccagcgccacctctgcccagagcgagccggagctgaagctggagagcgtggtgatcgtgagcaggcacggcgtgagggccccgaccaaggccacccagctgatgcaggacgtgaccccggacgcgttctacacctggccggtgaagctgggcgagctgaccccgaggggcggcgagctgatcgcctacctgggccactactggaggcagaggctggtggccgacggcctgctgccgaagaagggctgcccgcagagcggccaggtggccatcatcgccgacgtggacgagaggaccaggaagaccggcgaggccttcgccgccggcctggccccggactgcgccatcaccgtgcacacccaggccgacaccagcagcccggacccgctgttcaacccgctgaagaccggcgtgtgccagctggacaacgcccaggtgaccgacgccatcctggagagggccggcggcagcatcgccgacttcaccggccactaccagaccgccttcagggagctggagagggtgctgaacttcccgcagagcaacctgtgcctgaagagggagaagcaggacgagagctgcagcctgacccaggccctgccgagcgagctgaaggtgagcgccgacaacgtgagcctgaccggcgccgtgagcctggccagcatgctgaccgagattttcctgctgcagcaggcccagggcatgccggagccgggctggggcaggatcaccgacagccaccagtggaacaccctgctgagcctgcacaacgcccagttcgacctgctgcagaggaccccggaggtggccaggagcagggccaccccgctgctggacctgatcaagaccgccctgaccccgcacccgccgcagaagcaggcctacggcgtgaccctgccgaccagcgtgctgttcatcgccggccacgacaccaacctggccaacctgggcggcgccctcgagctgcagtggaccctgccgggccagccggacaacaccccgccgggcggcgagctggtgttcgagaggtggaggaggctgagcgacaacagccagtggattcaggtgagcctggtgttccagaccctgcagcagatgagggacaagaccccgctgtccctgaacaccccgccgggcgaggtgaagctgaccctggccggctgcgaggagaggaacgcccagggcatgtgcagcctggccggcttcacccagatcgtgaacgaggccaggattccggcctgcagcctgagcgagaaggacgagctgtgacctaggtccccgaatttccccgatcgttcaaacatttggcaataaagtttcttaagattgaatcctgttgccggtcttgcgatgattatcatataatttctgttgaattacgttaagcatgtaataattaacatgtaatgcatgacgttatttatgagatgggtttttatgattagagtcccgcaattatacatttaatacgcgatagaaaacaaaatatagcgcgcaaactaggataaattatcgcgcgcggtgtcatctatgttactagatcgggaattg

SEQ ID NO: 97 - DNA, 3606 bp, Artificial Sequence
  Synthetic construct, pAG4870
ctgcagtgcagcgtgacccggtcgtgcccctctctagagataatgagcattgcatgtctaagttataaaaaattaccacatattttttttgtcacacttgtttgaagtgcagtttatctatctttatacatatatttaaactttactctacgaataatataatctatagtactacaataatatcagtgttttagagaatcatataaatgaacagttagacatggtctaaaggacaattgagtattttgacaacaggactctacagttttatctttttagtgtgcatgtgttctcctttttttttgcaaatagcttcacctatataatacttcatccattttattagtacatccatttagggtttagggttaatggtttttatagactaatttttttagtacatctattttattctattttagcctctaaattaagaaaactaaaactctattttagtttttttatttaataatttagatataaaatagaataaaataaagtgactaaaaattaaacaaataccctttaagaaattaaaaaaactaaggaaacatttttcttgtttcgagtagataatgccagcctgttaaacgccgtcgacgagtctaacggacaccaaccagcgaaccagcagcgtcgcgtcgggccaagcgaagcagacggcacggcatctctgtcgctgcctctggacccctctcgagagttccgctccaccgttggacttgctccgctgtcggcatccagaaattgcgtggcggagcggcagacgtgagccggcacggcaggcggcctcctcctcctctcacggcacggcagctacgggggattcctttcccaccgctccttcgctttcccttcctcgcccgccgtaataaatagacaccccctccacaccctctttccccaacctcgtgttgttcggagcgcacacacacacaaccagatctcccccaaatccacccgtcggcacctccgcttcaaggtacgccgctcgtcctccccccccccccctctctaccttctctagatcggcgttccggtccatggttagggcccggtagttctacttctgttcatgtttgtgttagatccgtgtttgtgttagatccgtgctgctagcgttcgtacacggatgcgacctgtacgtcagacacgttctgattgctaacttgccagtgtttctctttggggaatcctgggatggctctagccgttccgcagacgggatcgatttcatgattttttttgtttcgttgcatagggtttggtttgcccttttcctttatttcaatatatgccgtgcacttgtttgtcgggtcatcttttcatgcttttttttgtcttggttgtgatgatgtggtctggttgggcggtcgttctagatcggagtagaattctgtttcaaactacctggtggatttattaattttggatctgtatgtgtgtgccatacatattcatagttacgaattgaagatgatggatggaaatatcgatctaggataggtatacatgttgatgcgggttttactgatgcatatacagagatgctttttgttcgcttggttgtgatgatgtggtgtggttgggcggtcgttcattcgttctagatcggagtagaatactgtttcaaactacctggtgtatttattaattttggaactgtatgtgtgtgtcatacatcttcatagttacgagtttaagatggatggaaatatcgatctaggataggtatacatgttgatgtgggttttactgatgcatatacatgatggcatatgcagcatctattcatatgctctaaccttgagtacctatctattataataaacaagtatgttttataattattttgatcttgatatacttggatgatggcatatgcagcagctatatgtggatttttttagccctgccttcatacgctatttatttgcttggtactgtttcttttgtcgatgctcaccctgttgtttggtgttacttctgcagatccagatcggatccaccatgagggtgttgctcgttgccctcgctctcctggctctcgctgcgagcgccaccagcgctgcgcagtccgagccggagctgaagctggagtccgtggtgatcgtgtcgcgccacggggtgcgcgccccgaccaaggccacgcagctcatgcaggacgtgaccccggacgcctggccgacctggccggtgaagctcggcgagctgaccccgcgcggcggcgagctgatcgcctacctcggccactactggcgccagcgcctcgtggccgacggcctcctcccgaagtgcggctgcccgcagtccggccaggtggcgatcatcgccgacgtggacgagcgcacccgcaagacgggcgaggccttcgccgccggcctcgccccggactgcgccatcaccgtgcacacccaggccgacacctcctccccggacccgctcttcaacccgctcaagaccggcgtgtgccagctcgacaacgccaacgtgaccgacgccatcctggagcgcgccggcggctccatcgccgacttcaccggccactaccagaccgccttccgcgagctggagcgcgtgctcaacttcccgcagtcgaacctctgcctcaagcgcgagaagcaggacgagtcctgctccctcacccaggccctcccgtccgagctgaaggtgtccgccgactgcgtgtccctcaccggcgccgtgtccctcgcctccatgctcaccgaaatcttcctcctccagcaggcccagggcatgccggagccgggctggggccgcatcaccgactcccaccagtggaacaccctcctctccctccacaacgcccagttcgacctcctccagcgcaccccggaggtggcccgctcccgcgccaccccgctcctcgacctcatcaagaccgccctcaccccgcacccgccgcagaagcaggcctacggcgtgaccctcccgacctcggtgctcttcatcgccggccacgacaccaacctcgccaacctcggcggcgccctggagctgaactggaccctcccgggccagccggacaacaccccgccgggcggcgagctggtgttcgagcgctggcgccgcctctccgacaactcccagtggattcaggtgtccctcgtgttccagaccctccagcagatgcgcgacaagaccccgctctccctcaacaccccgccgggcgaggtgaagctcaccctggccggctgcgaggagcgcaacgcgcagggcatgtgctccctcgccggcttcacccagatcgtgaacgaggcccgcatcccggcctgctccctctccgagaaggacgagctgtaacctaggtccccgaatttccccgatcgttcaaacatttggcaataaagtttcttaagattgaatcctgttgccggtcttgcgatgattatcatataatttctgttgaattacgttaagcatgtaataattaacatgtaatgcatgacgttatttatgagatgggtttttatgattagagtcccgcaattatacatttaatacgcgatagaaaacaaaatatagcgcgcaaactaggataaattatcgcgcgcggtgtcatctatgttactagatcgggaattg

SEQ ID NO: 98 - DNA, 2904 bp, Artificial Sequence
  Synthetic construct, pAG4867
tctagagatgtaatggtgttaggacacgtggttagctactaatataaatgtaaggtcaaaattcgatggtttattttctattttcaattacctagcattatctcatttctaattgtgtgataacaaatgcattagaccataattctgtaaatacgtacatttaagcacacagtctatattttaaaattcttctttttgtgtggatatcccaacccaaatccacctctctcctcaatccgtgtatcttcaccgctgccaagtgccaacaacacatcgcatcgtgcaaatctttgttggtttgtgcacggtcggcgccaatggaggagacacctgtacggtgcccttggtagaacaacatccttatccctatatgtatggtgcccttcgtagaatggcaccccttatccctacaatagccatgtatgcataccaagaattaaatatactttttcttgaaccacaataatttattatagcggcacttcttgttctggttgaacacttatttggaacaataaaatcccgagttcctaaccacaggttcactttttttccttatcctcctaggaaactaaattttaaattcataaatttaattgaaatgttaatgaaaacaaaaaaattatctacaaagacgactcttagccacagccgcctcactgcaccctcaaccacatcctgcaaacagacaccctcgccacatccctccagattcttccctccgatgcagcctacttgctaacagacgccctctccacatcctgcaaagcattcctccaaattcttgcgatcccccgaatccagcattaactgctaagggacgccctctccacatcctgctacccaattagccaacggaataacacaagaaggcaggtgagcagtgacaaagcacgtcaacagcaccgagccaagccaaaaaggagcaaggaggagcaagcccaagccgcagccgcagctctccaggtccccttgcgattgccgccagcagtagcagacacccctctccacatcccctccggccgctaacagcagcaagccaagccaaaaagaagcctcagccacagccggttccgttgcggttaccgccgatcacatgcccaaggccgcgcctttccaaacgccgagggccgcccgttcccgtgcacagccacacacacacccgcccgccaacgactccccatccctatttgaacccacccgcgcactgcattgatcaccaatcgcatcgcagcagcacgagcagcacgccgtgccgctccaaccgtctcgcttccctgcttagcttcccgccgcgccggatccaccatgagggtgttgctcgttgccctcgctctcctggctctcgctgcgagcgccaccagcgctgcgcagtccgagccggagctgaagctggagtccgtggtgatcgtgtcgcgccacggggtgcgcgccccgaccaaggccacgcagctcatgcaggacgtgaccccggacgcctggccgacctggccggtgaagctcggcgagctgaccccgcgcggcggcgagctgatcgcctacctcggccactactggcgccagcgcctcgtggccgacggcctcctcccgaagtgcggctgcccgcagtccggccaggtggcgatcatcgccgacgtggacgagcgcacccgcaagacgggcgaggccttcgccgccggcctcgccccggactgcgccatcaccgtgcacacccaggccgacacctcctccccggacccgctcttcaacccgctcaagaccggcgtgtgccagctcgacaacgccaacgtgaccgacgccatcctggagcgcgccggcggctccatcgccgacttcaccggccactaccagaccgccttccgcgagctggagcgcgtgctcaacttcccgcagtcgaacctctgcctcaagcgcgagaagcaggacgagtcctgctccctcacccaggccctcccgtccgagctgaaggtgtccgccgactgcgtgtccctcaccggcgccgtgtccctcgcctccatgctcaccgaaatcttcctcctccagcaggcccagggcatgccggagccgggctggggccgcatcaccgactcccaccagtggaacaccctcctctccctccacaacgcccagttcgacctcctccagcgcaccccggaggtggcccgctcccgcgccaccccgctcctcgacctcatcaagaccgccctcaccccgcacccgccgcagaagcaggcctacggcgtgaccctcccgacctcggtgctcttcatcgccggccacgacaccaacctcgccaacctcggcggcgccctggagctgaactggaccctcccgggccagccggacaacaccccgccgggcggcgagctggtgttcgagcgctggcgccgcctctccgacaactcccagtggattcaggtgtccctcgtgttccagaccctccagcagatgcgcgacaagaccccgctctccctcaacaccccgccgggcgaggtgaagctcaccctggccggctgcgaggagcgcaacgcgcagggcatgtgctccctcgccggcttcacccagatcgtgaacgaggcccgcatcccggcctgctccctctccgagaaggacgagctgtaacctaggtccccgaatttccccgatcgttcaaacatttggcaataaagtttcttaagattgaatcctgttgccggtcttgcgatgattatcatataatttctgttgaattacgttaagcatgtaataattaacatgtaatgcatgacgttatttatgagatgggtttttatgattagagtcccgcaattatacatttaatacgcgatagaaaacaaaatatagcgcgcaaactaggataaattatcgcgcgcggtgtcatctatgttactagatcgggaattg

SEQ ID NO: 99 - DNA, 21 bp, Artificial Sequence
  Synthetic construct, PCR primer 580
cgttgcatagggtttggtttg

SEQ ID NO: 100 - DNA, 18 bp, Artificial Sequence
  Synthetic construct, PCR primer 688
tcgacttggaggaggatg

SEQ ID NO: 101 - DNA, 19 bp, Artificial Sequence
  Synthetic construct, PCR primer 732
tggctaggacttgcagttt

SEQ ID NO: 102 - DNA, 24 bp, Artificial Sequence
  Synthetic construct, probe PB10
atctcgccacctcttccacatcac

SEQ ID NO: 103 - DNA, 24 bp, Artificial Sequence
  Synthetic construct, probe PB 11
tgtgatgatgtggtctggttgggc

SEQ ID NO: 104 - DNA, 22 bp, Artificial Sequence
  Synthetic construct, PCR primer 516
aacgtgactcccttaattctcc

SEQ ID NO: 105 - DNA, 20 bp, Artificial Sequence
  Synthetic construct, PCR primer  696
caccaaccttctggcatttg

SEQ ID NO: 106 - DNA, 22 bp, Artificial Sequence
  Synthetic construct, PCR primer 620
gattgccaagctgaaacatttg

SEQ ID NO: 107 - DNA, 19 bp, Artificial Sequence
  Synthetic construct, PCR primer 666
aatctgggccgctatttcc

SEQ ID NO: 108 - DNA, 24 bp, Artificial Sequence
  Synthetic construct, PCR primer 667
gccttgtcttagtcattgatttcc

SEQ ID NO: 109 - DNA, 22 bp, Artificial Sequence
  Synthetic construct, PCR primer 504
ctcatgatcaggttgtcgtttc

SEQ ID NO: 110 - DNA, 18 bp, Artificial Sequence
  Synthetic construct, PCR primer 747
aatctgggccgctatttc

SEQ ID NO: 111 - DNA, 17 bp, Artificial Sequence
  Synthetic construct, PCR primer 753
tttcacacgcctagtgg

SEQ ID NO: 112 - DNA, 30 bp, Artificial Sequence
  Synthetic construct, probe PB6
ctatcagtgcttccccaagttactagaacc

SEQ ID NO: 113 - DNA, 25 bp, Artificial Sequence
  ynthetic construct, probe PB8
tcagtgtttgaggaggatgtccacc

SEQ ID NO: 114 - DNA, 28 bp, Artificial Sequence
  Synthetic construct, probe PB9
cgccttgtcttagtcattgatttcctgc

SEQ ID NO: 115 - DNA, 23 bp, Artificial Sequence
  Synthetic construct, probe PB14
aatagggccatcgctcttagccc

SEQ ID NO: 116 - protein, 523 aa, Zea mays
  MISC_FEATURE (1)..(523): ACR23335 phytase
TAVPAEPASTLSGPSRPVTVAIGDRGHAVDLPDTDPRVQRRVTGWAPEQVAVALSASPTSAWVSWITGDYQMGGAVEPLDPGAVGSVVRYGLAADALDHEATGESLVYSQLYPFEGLQNYTSGIIHHVRLQGLEPGTRYVYRCGDPAIPDAMSGVHAFRTMPAVGPGSYPGRIAVVGDLGLTYNTTSTVDHLVRNRPDLVLLLGDVCYANLYLTNGTGADCYSCAFAKSTPIHETYQPRWDYWGRYMEPVTSSIPMMVVEGNHEIEQQIHNRTFAAYSSRFAFPSEESGSSSPFYYSFDAGGIHFVMLASYADYSRSGAQYKWLEADLEKVDRSVTPWLIAGWHAPWYTTYKAHYREAECMRVEMEELLYAYGVDVVFTGHVHAYERSNRVFNYTLDACGPVHISVGDGGNREKMATAHADEAGHCPDPASTPDPFMGGRLCAANFTSGPAAGRFCWDRQPEYSAYRESSFGHGVLEVRNDTHALWRWHRNQDLHAANVAADEVYIVREPDKCLAKTARLLAY

SEQ ID NO: 117 - protein, 301 aa, Zea mays
  MISC_FEATURE (1)..(301): AAB52233  phytase
SMAARITYERSGGTRSLVARDMDDYVVYGLNACLQNVRNCCVRLDAIDKLRAHYDALADAVAEPAANVEGLAAEASEYKAAMWQYCYNQRSASARAHSRAYSQALKLEGIDFAELVRRHQLRLGYGSKGEEFEDLDDTQKLEVYNSIIVESGRAGLPVRMFSSGRSAGGPKIAATTWAQAVSVFIMAAGNLAWDVFTTEHEVEAILKGSLNLLAGLGGFAVEAVVGAAVTKAVANVAAGVFACSLAGFVVGAIAGLIFVGVSGLLINLIIGSPRKVPDMSKLMFHTAVMPDGMALAYAVSH

SEQ ID NO: 118 - protein, 410 aa, Escherichia coli
  MISC_FEATURE (1)..(410): 1DKL    phytase
QSEPELKLESVVIVSRHGVRAPTKATQLMQDVTPDAWPTWPVKLGWLTPRGGELIAYLGHYQRQRLVADGLLAKKGCPQSGQVAIIADVDERTRKTGEAFAAGLAPDCAITVHTQADTSSPDPLFNPLKTGVCQLDNANVTDAILSRAGGSIADFTGHRQTAFRELERVLNFPQSNLCLKREKQDESCSLTQALPSELKVSADNVSLTGAVSLASMLTEIFLLQQAQGMPEPGWGRITDSHQWNTLLSLHNAQFYLLQRTPEVARSRATPLLDLIKTALTPHPPQKQAYGVTLPTSVLFIAGHDTNLANLGGALELNWTLPGQPDNTPPGGELVFERWRRLSDNSQWIQVSLVFQTLQQMRDKTPLSLNTPPGEVKLTLAGCEERNAQGMCSLAGFTQIVNEARIPACSL

SEQ ID NO: 119 - DNA, 20 bp, Artificial Sequence
  Synthetic construct, PCR primer 511
gcgcggtgtcatctatgtta

SEQ ID NO: 120 - DNA, 21 bp, Artificial Sequence
  Synthetic construct, PCR primer 779
gagcccgatcctaatccaatc

SEQ ID NO: 121 - DNA, 22 bp, Artificial Sequence
  Synthetic construct, PCR primer 784
gccttgtagccttcttgagtat

SEQ ID NO: 122 - DNA, 30 bp, Artificial Sequence
  Synthetic construct, probe PB15
ccgcaatgtgttattaagttgtctaagcgt

SEQ ID NO: 123 - DNA, 24 bp, Artificial Sequence
  Synthetic construct, probe PB16
ttgtaccatgagttgtgggtaggg

SEQ ID NO: 124 - DNA, 3004 bp, Zea mays
  promoter (1)..(3004): Maize globulin 1
cggtatgaatttggaaacaaattcagtacttttaaaaaaatttgttgtagggagcaaataatacataaaataatttatgcattattttattttttatttgtaataatatgcttgaaacgataattcagtatgcatgttgtgccagtgtactacacgggcggggggaggggattgagtgggccagcgcggtgcgtagggtagatgggctgaaattgataactcaagtccgactaggttctctttttatttcccttccttttctattttcctttcttttaattttcatgctttcaaactaaattcaaattcgagttttgaatttcagcttctaaattgtacactaaaattatatgataaggtaacccctactattacttttaatttttttattctaccccatattgtttacttaggggagaataattgacttaatcacattcttccttaggtttcaattctcaatctttcaaatccacatttttagatttctattttgaatttaaataccagtttggatttagagttcaatttcaaaatacacaaccaaaataccagcatgaatgcaaatatattttatgtttatgtatttacttttcttttatactttgctcaaaatagttattttcatgtatgaaactcaataagcaaggaactcacgttattatataacctaataggaataatttaggtaacataatttatcatcctcttgatttaaaagagatatgcctccagaataagacacatactaaaaataactctaatattgaataactaaagtcgtacaaatctctactattattcctataaaataataaagaactagctacaacttctttaaggcattattcagggtttacagcttgagaggcatgaacccatcctgtatactcctggacttggaagacaaaatgtcaaccaaagtgaaaggttttcttatggttgctgctaagagatagattgaacactagatctctcctaagacgtcagggcatgcgtttagactcctacacatgcgaaaactgcatcttacagttggaagaaactatatctcaccacttcctgcggtgtaactttgcccaaagatgttggctcactgttggaatcactccgccccgaactttggatctaacgcttgcagtgctacatattagagcaagactaacaatgccgtggagaatggaaggtattataaccatgtcatggtgcatatggaaatgtcgaaataactggatattcgaaaacataccgccaacggtggcggcctgcaaggaaatgttcaagactgaaatgaactacatctgctaccaagttaagctcgagacaggagctaaaagtagaaactggatacaacactttgtaacatagtgacactccccttttcctttcttttaccttagaactatacatacaatccacattcaataaaaatttgtaggtacgccatacacactaccggaatccggctctttgccgagtgtgaggcgctttgtcgagtgctttttgtccagcactcggcaaaaaagtctttgccatgtgccgcactcggcaaagtcctgctctcggtaacgaccgcgtttaccgagagcaggactctcgacacagaaatacactcgacaaagaaatctttgccgagagccaaacactcggcgaacggcagcgctcggcaaagggtcgtcagccgccgtctaaagctgacggtcgttatctttgtcgagtgccccctcgtccgacactcagtagagcaagcttgccgagtgccatccttggacactcgataaagtatattttatttttttttattttgccaaccaaactttttgtggtatgttcctacactatgtagatctacatgtaccattttggcacaattacaaaaatgttttctataactattagatttagttcgtttatttgaatttcttcggaaaattcacatatgaactgcaagtcactcgaaacatgaaaaaccgtgcatgcaaaataaatgatatgcatgttatctagcacaagttacgaccgaattcagaagcagaccagaatcttcaagcaccatgctcactaaacatgaccgtgaacttgttatccagttgtttaaaaattgtataaaacacaaataaagtcagaaattaatgaaacttgtccacatgtcatgatatcatatatagaggttgtgataaaaatttgataatgtttcggtaaagttgtgacgtactatgtgtagaaacctaagtgacctacacataaaatcatagagtttcaatgtagttcactcgacaaagactttgtcaagtgtccgataaaaagtattcagcaaagaagccgttgtcgatttactgttcgtcgagatctctttgccgagtgtcacactaggcaaagtctttacggagtgtttttcaggctttgacactcggcaaagcgctcgattccagtagtgacagtaatttgcatcaaaaatagccgagagatttaaaatgagtcaactaatagaccaactaattattagctattagtcgttagcttctttaatctaagctaaaaccaactaatagcttatttgttgaattacaattagctcaacggaattctctgttttttctataaaaaaaagggaaactgcccctcatttacagcaaactgtccgctgcctgtcgtccagatacaatgaacgtacctagtaggaactcttttacacgctcggtcgctcgccgcggatcggagtcccaggaacacgacaccactgtggaacacgacaaagtctgctcagaggcggccacaccctggcgtgcaccgagccggagcccggataagcacggtaaggagagtacggcgggacgtggcgacccgtgtgtctgctgccacgcagccttcctccacgtagccgcgcggccgcgccacgtaccagggcccggcgctggtataaatgcgcgccacctccgctttagttctgcatacagccaacccaacacacacccgagcatatcacagtgacagacactacacg

SEQ ID NO: 125 - DNA, 38539 bp, Artificial Sequence
  Synthetic construct, PY15 locus
aagcttcaacgttaatccagccatctttgtcacaatggtttaatgggcaacgaccgttgtgtaatacaactagtttgggagtccaaataccggagagaattagaggtgctaaaatctttttcttattcaaaattcaataaggagaggaatttagcccctccgattttatggcttctaaactagccttaaatgtaaccgtacaagtgagccttcgaatccgttagatataatcaatcatatattaaatttaacacttaaatcctgctacaccggcttacgtagatttgtataaaaaacctaataagccacagttatatccaaactagttttgttggcttccggcggtatgtctcttttctttaccggcggtttataaaaagcggaagccactagtatgagatatgtagatatggactaaaaagatattaatgtaaggagatgtttggtttataagaactaatttttagtccatctattttattttattttagtttctaaattaacaaatacgaaaactaaaattttatttcctatttagcaatttaacgactaaaatgaaataaaataaaaaggactaattactaaatgtgggaactaaaattctattttaatttccatatttactaatttagatattaaaatgaaataaaatggagggaataaaaattagtccctagaaactaaacacccctaaaaattagtctctacaaatcaaacatcccctaaaaattaatcagtagaaaacaaacatctctaaaaattagtagttaaacttatgtaaaaaaaattagtcaaacttatgtaaaaaaccaaataaattaaaaattagaacaaagagagtagttaataaaccacatataacaatagaattgttataaatgctgcttctatttcctccgatcggaactgttcagccaccttccatcgatagcgaacttggatcagccaccttccatcgatagcgaacttggaggttcaaatattgtaaaaatacaagaagaaaggttttactctttatttctttgaaaggggtcgccgaagaaggttagttgatgtctcttatagcttttttgcacaggtgtaagagcaatcaaaccctatatatccgtttcaaatcaatccgaagcgtagagaagtctactgtttttttagcgtggtaaattgtagacccctctcgtggacatggtgacttcttttaacattttaagtatttttaagataatggacacatggataacatatatatactactctttaaattataacggacatgcactaactaaccttcttcggcgacccctttcaaagaaataaagagtatttataaagttgtgataattggatgttgattataaatctaatagtatcaattttatatttaaaatgtgaaaatcgaaaaggaataaattacaatggaccctggctattgtaagtttggaactctgtttccctacaaatcacactcgtgtcaagagcttctagcagcccagaaaaggtggactttgctctagtgtcagaaaagtccgagtgagctatatttcttggaaaatacaagtttgtttcagagcaaaaaacatttttcttttataaaagggccagcatgacaagatgatggctgactatcagcaaaagacacgaagtacaaaaaagaacaaaagatgtaaaaccctgcatccactgtattcatggacaacaaaaacagttcatcgatcattgttcaggtagaacacagtcgaaagaacgcaccccagagccagaatgcgaggaagcctattttcataataaaactgagagcgagaacacatttttttataagcgagcgacaacgttgaaccaagggcaagccatgcgcgtgtactccagcggtcgtcctcaccaacccaagtctcgagtcctgaatcctgatgcgcaccaaccacagccctaccaccgagcttcctgccccctccggccaacacgaaacttccgaaccactgtccactggctcccaagattagcgtatgtctgtgttctctgcaaacaaaaactcgtacattgccttggtcgtcttggaccagtcaccacagtccacaccaccagctcccctccctttccggaccctattgtgtttggaaaaatttcactctaaagctattcttatcacactatttttaatgttatcacgtcaataagattaaaatgcatttaagaacgaaatatgctctctcaatgaagagtttcatgacacaattttataggctaacatgtgattttaaatgttgcatgtaaataaccaatatgaatagataaaatagatggagataaataaattgttctcattggtggtttcatgcgcttttcagtaccttgaaaacgggttgacatagtttcgtagtgatgaaactagtttaatctatttcataataaatgtagtgttgtgtcatcaaaaatattatgtaattaatgtcataaataaattctctcataaaactctcatcgagaatggtctaagaaattcagctctattccacgaactctaccttttaataggtccaccatagagttgaaacaggaaaaattgtttagcttagcatttgactctagctccatgaatgatatagattttagaggaaatatctcttatattcttattttcaaggacccacatataggtgacctaattccattgtttctctatctttcatcgcactcacccagtcatctctctcgataaaacgatgcgaggcatgagatggcggcctccatcctcgcctccacgaggagatgcacatggcgagcccactggttgcccgtgagaagtggtcgtagcaagccgactgccgatgtggaggaggtggcacgctagggatatatgtccgccggtgtggaagaggaggtgcgctggggaagcgtgtcgacttggaggaggatgcacaatgaatatgtatggcacacacatacagatccaaaattaataaatccaccaggtagtttgaaacagaattctactccgatctagaacgaccgcccaaccagaccacatcatcacaaccaagacaaaaaaaagcatgaaaagatgacccgacaaacaagtgcacggcatatattgaaataaaggaaaagggcaaaccaaaccctatgcaacgaaacaaaaaaaatcatgaaatcgatcccgtctgcggaacggctagagccatcccaggattccccaaagagaaacactggcaagttagcaatcagaacgtgtctgacgtacaggtcgcatccgtgtacgaacgctagcagcacggatctaacacaaacacggatctaacacaaacatgaacagaagtagaactaccgggccctaaccatggaccggaacgccgatctagagaaggtagagagggggggggggggaggacgagcggcgtaccttgaagcggaggtgccgacgggtggatttgggggagatctggttgtgtgtgtgtgcgctccgaacaacacgaggttggggaaagagggtgtggagggggtgtctatttattacggcgggcgaggaagggaaagcgaaggagcggtgggaaaggaatcccccgtagctgccgtgccgtgagaggaggaggaggccgcctgccgtgccggctcacgtctgccgctccgccacgcaatttctggatgccgacagcggagcaagtccaacggtggagcggaactctcgagaggggtccagaggcagcgacagagatgccgtgccgtctgcttcgcttggcccgacgcgacgctgctggttcgctggttggtgtccgttagactcgtcgacggcgtttaacaggctggcattatctactcgaaacaagaaaaatgtttccttagtttttttaatttcttaaagggtatttgtttaatttttagtcactttattttattctattttatatctaaattattaaataaaaaaactaaaatagagttttagttttcttaatttagaggctaaaatagaataaaatagatgtactaaaaaaattagtctataaaaaccattaaccctaaaccctaaatggatgtactaataaaatggatgaagtattatataggtgaagctatttgcaaaaaaaaaggagaacacatgcacactaaaaagataaaactgtagagtcctgttgtcaaaatactcaattgtcctttagaccatgtctaactgttcatttatatgattctctaaaacactgatattattgtagtactatagattatattattcgtagagtaaagtttaaatatatgtataaagatagataaactgcacttcaaacaagtgtgacaaaaaaaatatgtggtaattttttataacttagacatgcaatgctcattatctctagagaggggcacgaccgggtcacgctgcactgcaggaattccaattcccgatctagtaacatagatgacaccgcgcgcgataatttatcctagtttgcgcgctatattttgttttctatcgcgtattaaatgtataattgcgggactctaatcataaaaacccatctcataaataacgtcatgcattacatgttaattattacatgcttaacgtaattcaacagaaattatatgataatcatcgcaagaccggcaacaggattcaatcttaagaaactttattgccaaatgtttgaacgatcggggaaattcggggacctaggtcacagctcgtccttctcgctcaggctgcaggccggaatcctggcctcgttcacgatctgggtgaagccggccaggctgcacatgccctgggcgttcctctcctcgcagccggccagggtcagcttcacctcgcccggcggggtgttcaggaacagcggggtcttgtccctcatctgctgcagggtctggaacaccaggctcacctgaatccactggctgttgtcgctcagcctcctccacctctcgaacaccagctcgccgcccggcggggtgttgtccggctggcccggcagggtccactgcagctcgagggcgccgcccaggttggccaggttggtgtcgtggccggcgatgaacagcacgctggtcggcagggtcacgccgtaggcctgcttctgcggcgggtgcggggtcagggcggtcttgatcaggtccagcagcggggtggccctgctcctggccacctccggggtcctctgcagcaggtcgaactgggcgttgtgcaggctcagcagggtgttccactggtggctgtcggtgatcctgccccagcccggctccggcatgccctgggcctgctgcagcaggaaaatctcggtcagcatgctggccaggctccaggcgccggtcaggctcacgttgtcggcgctcaccttcagctcgctcggcagggcctgggtcaggctggcgctctcgtcctgcttctccctcttcagggccaggttgctctgcgggaagttcagcaccctctccagctccctgaaggcggtctggtagtggccggtgaagtcggcgatgctgccgccggccctctccaggatggcgtcggtcacctgggccacgtccagctggcacacgccggtcttcagcgggttgaacagcgggtccgggctgctggtgtcggcctgggtgtgcacggtgatggcgcagtccggggccaggccggcggcgaaggcctcaccggtcttcctggtcctctcgtccacgtcggcgatgatggccacctggccgctctgcgggcagcccttcttcggcagcaggccgtcggccaccagcctctgcctccagtagtggcccaggtaggcgatcagctcgccgcccctcggggtcagctcgcccagcttcaccggccaggtgtagaacgcgtccggggtcacgtcctgcatcagctgggtgaacttggtcggggccctcacgccgtgcctgctcacgatcaccacgctctccagcttcagctccggctcgctctgggcagaggtggcgctggcagcaagagccagcagggccagggccacgagcagcacgcgcatggtttaggatcccgtgtagtgtctgtcactgtgatatgctcgggtgtgtgttgggttggctgtatgcagaactaaagcggaggtggcgcgcatttataccagcgccgggccctggtacgtggcgcggccgcgcggctacgtggaggaaggctgcgtggcagcagacacacgggtcgccacgtcccgccgtactctccttaccgtgcttatccgggctccggctcggtgcacgccagggtgtggccgcctctgagcagactttgtcgtgttccacagtggtgtcgtgttcctgggactccgatccgcggcgagcgaccgagcgtgtaaaagagttcctactaggtacgttcattgtatctggacgacaggcagcggacagtttgctgtaaatgaggggcagtttcccttttttttatagaaaaaacagagaattccgttgagctaattgtaattcaacaaataagctattagttggttttagcttagattaaagaagctaacgactaatagctaataattagttggtctattagttgactcattttaaatctctcggctatttttgatgcaaattactgtcactactggaatcgagcgctttgccgagtgtcaaagcctgaaaaacactccgtaaagactttgcctagtgtgacactcggcaaagagatctcgacgaacagtaaatcgacaacggcttctttgctgaatactttttatcggacacttgacaaagtctttgtcgagtgaactacattgaaactctatgattttatgtgtaggtcacttaggtttctacacatagtacgtcacaactttaccgaaacattatcaaatttttatcacaacctctatatatgatatcatgacatgtggacaagtttcattaatttctgactttatttgtgttttatacaatttttaaacaactggataacaagttcacggtcatgtttagtgagcatggtgcttgaagattctggtctgcttctgaattcggtcgtaacttgtgctagataacatgcatatcatttattttgcatgcacggtttttcatgtttcgagtgacttgcagttcatatgtgaattttccgaagaaattcaaataaacgaactaaatctaatagttatagaaaacatttttgtaattgtgccaaaatggtacatgtagatctacatagtgtaggaacataccacaaaaagtttggttggcaaaataaaaaaaaataaaatatactttatcgagtgtccaaggatggcactcggcaagcttgctctactgagtgtcggacgagggggcactcgacaaagataacgaccgtcagctttagacggcggctgacgaccctttgccgagcgctgccgttcgccgagtgtttggctctcggcaaagatttctttgtcgagtgtatttctgtgtcgagagtcctgctctcggtaaacgcggtcgttaccgagagcaggactttgccgagtgcggcacatggcaaagacttttttgccgagtgctggacaaaaagcactcgacaaagcgcctcacactcggcaaagagccggattccggtagtgtgtatggcgtacctacaaatttttattgaatgtggattgtatgtatagttctaaggtaaaagaaaggaaaaggggagtgtcactatgttacaaagtgttgtatccagtttctacttttagctcctgtctcgagcttaacttggtagcagatgtagttcatttcagtcttgaacatttccttgcaggccgccaccgttggcggtatgttttcgaatatccagttatttcgacatttccatatgcaccatgacatggttataataccttccattctccacggcattgttagtcttgctctaatatgtagcactgcaagcgttagatccaaagttcggggcggagtgattccaacagtgagccaacatctttgggcaaagttacaccgcaggaagtggtgagatatagtttcttccaactgtaagatgcagttttcgcatgtgtaggagtctaaacgcatgccctgacgtcttaggagagatctagtgttcaatctatctcttagcagcaaccataagaaaacctttcactttggttgacattttgtcttccaagtccaggagtatacaggatgggttcatgcctctcaagctgtaaaccctgaataatgccttaaagaagttgtagctagttctttattattttataggaataatagtagagatttgtacgactttagttattcaatattagagttatttttagtatgtgtcttattctggaggcatatctcttttaaatcaagaggatgataaattatgttacctaaattattcctattaggttatataataacgtgagttccttgcttattgagtttcatacatgaaaataactattttgagcaaagtataaaagaaaagtaaatacataaacataaaatatatttgcattcatgctggtattttggttgtgtattttgaaattgaactctaaatccaaactggtatttaaattcaaaatagaaatctaaaaatgtggatttgaaagattgagaattgaaacctaaggaagaatgtgattaagtcaattattctcccctaagtaaacaatatggggtagaataaaaaaattaaaagtaatagtaggggttaccttatcatataattttagtgtacaatttagaagctgaaattcaaaactcgaatttgaatttagtttgaaagcatgaaaattaaaagaaaggaaaatagaaaaggaagggaaataaaaagagaacctagtcggacttgagttatcaatttcagcccatctaccctacgcaccgcgctggcccactcaatcccctccccccgcccgtgtagtacactggcacaacatgcatactgaattatcgtttcaagcatattattacaaataaaaaataaaataatgcataaattattttatgtattatttgctccctacaacaaatttttttaaaagtactgaatttgtttccaaattcataccgggtacccaattcccgatctagtaacatagatgacaccgcgcgcgataatttatcctagtttgcgcgctatattttgttttctatcgcgtattaaatgtataattgcgggactctaatcataaaaacccatctcataaataacgtcatgcattacatgttaattattacatgcttaacgtaattcaacagaaattatatgataatcatcgcaagaccggcaacaggattcaatcttaagaaactttattgccaaatgtttgaacgatcggggaaattcggggacctaggtcacagctcgtccttctcgctcaggctgcaggccggaatcctggcctcgttcacgatctgggtgaagccggccaggctgcacatgccctgggcgttcctctcctcgcagccggccagggtcagcttcacctcgcccggcggggtgttcaggaacagcggggtcttgtccctcatctgctgcagggtctggaacaccaggctcacctgaatccactggctgttgtcgctcagcctcctccacctctcgaacaccagctcgccgcccggcggggtgttgtccggctggcccggcagggtccactgcagctcgagggcgccgcccaggttggccaggttggtgtcgtggccggcgatgaacagcacgctggtcggcagggtcacgccgtaggcctgcttctgcggcgggtgcggggtcagggcggtcttgatcaggtccagcagcggggtggccctgctcctggccacctccggggtcctctgcagcaggtcgaactgggcgttgtgcaggctcagcagggtgttccactggtggctgtcggtgatcctgccccagcccggctccggcatgccctgggcctgctgcagcaggaaaatctcggtcagcatgctggccaggctccaggcgccggtcaggctcacgttgtcggcgctcaccttcagctcgctcggcagggcctgggtcaggctggcgctctcgtcctgcttctccctcttcagggccaggttgctctgcgggaagttcagcaccctctccagctccctgaaggcggtctggtagtggccggtgaagtcggcgatgctgccgccggccctctccaggatggcgtcggtcacctgggccacgtccagctggcacacgccggtcttcagcgggttgaacagcgggtccgggctgctggtgtcggcctgggtgtgcacggtgatggcgcagtccggggccaggccggcggcgaaggcctcaccggtcttcctggtcctctcgtccacgtcggcgatgatggccacctggccgctctgcgggcagcccttcttcggcagcaggccgtcggccaccagcctctgcctccagtagtggcccaggtaggcgatcagctcgccgcccctcggggtcagctcgcccagcttcaccggccaggtgtagaacgcgtccggggtcacgtcctgcatcagctgggtgaacttggtcggggccctcacgccgtgcctgctcacgatcaccacgctctccagcttcagctccggctcgctctgggcagaggtggcgctggcagcaagagccagcagggccagggccacgagcagcacgcgcatggtttaggatccggtgtcgatcgggttcttctgcgctctggagtagataaagctaatggtctgaagacccagtggtggtgatggagaagtgcacaggcatgcgagcgttatttatagctttgattaattaacacaatttcttgtgttcttatgccaccgagacggctgtaggcagcttcatggtttcttgccaaatgtatatgactcgtcactctctttacgtagcacgtcgatggttcatctggaatcattctgtacttctgcgtggctcagttttgttgccttctacaggttgttgatctacgtaaaacgaattagatttagcttgacatatggctttttttttgttgtaaatttactttacacgtcaaggatttttgtcctgttccggcctattttatttttcatgaaacgatctttgtaatgcaatatgagttgtttgtaatgtcttgtgagctgtaagcatgtatatcagatgagtatgatctcggcatgactcaccgtgtttctttgcacacagagaggatttgtttgattgtttcttacccaatacccttgacgtgcaattttggttgatgttctgtgagttgttaaggatacaacgaattcttggagctttacatgccaatgcatggttgtttcgtgttcctcaacatttaaggacttattcggttgcacctggatcgaaggggattgggagaaatcgattaaatctccttctatttaattttgactaggaagagatttaatcgtttccaacccctttcgatccagacgtaagcgaacaagttatttatttggatacctcttattcatcttaatacacacatggtattaagttgccactagtcatatgcctgtgcattgctacggtttatattatatatatatatatatatatatatatatatatatatatatatgataaattttgttttaataaaacatatgttttctattgattaggttgtgtgaatatgagccaacaaccaaggtccagaacacttatacataatttcaccttattttgtacataaactctcttattatagtagtaagagaagagattataagagtgcgggttgattataaagaaatgtaggagttttttaataatattgacacgagacgatcgttgaactggtgctttaatatagtaaagataaagattggtgttggggacttgttctcaaatgctatgaattaagaacaaggcaacataaaatgttaaatatcaaaatccttcgtccttcgaagcattattttcctttggatataatggatttcggacgaaggttatgaaggtcataccttcataatcataatcaaatgaaaaagtaaagaagattcacacataaaataatatgattactttggtacccaattcccgatctagtaacatagatgacaccgcgcgcgataatttatcctagtttgcgcgctatattttgttttctatcgcgtattaaatgtataattgcgggactctaatcataaaaacccatctcataaataacgtcatgcattacatgttaattattacatgcttaacgtaattcaacagaaattatatgataatcatcgcaagaccggcaacaggattcaatcttaagaaactttattgccaaatgtttgaacgatcggggaaattcggggacctaggtcacagctcgtccttctcgctcaggctgcaggccggaatcctggcctcgttcacgatctgggtgaagccggccaggctgcacatgccctgggcgttcctctcctcgcagccggccagggtcagcttcacctcgcccggcggggtgttcaggaacagcggggtcttgtccctcatctgctgcagggtctggaacaccaggctcacctgaatccactggctgttgtcgctcagcctcctccacctctcgaacaccagctcgccgcccggcggggtgttgtccggctggcccggcagggtccactgcagctcgagggcgccgcccaggttggccaggttggtgtcgtggccggcgatgaacagcacgctggtcggcagggtcacgccgtaggcctgcttctgcggcgggtgcggggtcagggcggtcttgatcaggtccagcagcggggtggccctgctcctggccacctccggggtcctctgcagcaggtcgaactgggcgttgtgcaggctcagcagggtgttccactggtggctgtcggtgatcctgccccagcccggctccggcatgccctgggcctgctgcagcaggaaaatctcggtcagcatgctggccaggctccaggcgccggtcaggctcacgttgtcggcgctcaccttcagctcgctcggcagggcctgggtcaggctggcgctctcgtcctgcttctccctcttcagggccaggttgctctgcgggaagttcagcaccctctccagctccctgaaggcggtctggtagtggccggtgaagtcggcgatgctgccgccggccctctccaggatggcgtcggtcacctgggccacgtccagctggcacacgccggtcttcagcgggttgaacagcgggtccgggctgctggtgtcggcctgggtgtgcacggtgatggcgcagtccggggccaggccggcggcgaaggcctcaccggtcttcctggtcctctcgtccacgtcggcgatgatggccacctggccgctctgcgggcagcccttcttcggcagcaggccgtcggccaccagcctctgcctccagtagtggcccaggtaggcgatcagctcgccgcccctcggggtcagctcgcccagcttcaccggccaggtgtagaacgcgtccggggtcacgtcctgcatcagctgggtgaacttggtcggggccctcacgccgtgcctgctcacgatcaccacgctctccagcttcagctccggctcgctctgggcagaggtggcgctggcagcaagagccagcagggccagggccacgagcagcacgcgcatggtttaggatccgttgttgtaggactaatgaactgaatgctttttgtgagaaacaatgagaaatcatcgtgcatttatagtgagataaaggctcttgcatctaaatgttaagatagagtttgttaatgtccagacatgaagtgactcatgatatatgaagtgtggtacacgaaaggtggatgaataatgatggacatacagatatgtataattgacgcagcattgtgttgttctttctctctttcttttgcaatatgacatggataatgtaaagccctcctctttttgacacgaaaggcaaatgaatttttgtgagtcatgccttgtcttataagctctcctctttttgcaatatgacatatagctctggagttttatgtacacatcattttgctttatcttgcttgagtctgtgatttgtcatgtgtcacgcctaatactcatcaaacgtgacttatgggtttatgttctaacatttagcggagaattaagggagtcacgttatgacccccgccgatgacgcgggacaagccgttttacgtttggaactgacagaaccgcaacgttgaaggagccactcagcctaagcggccgcattggacttaattaagtgaggccggccaagcgtcgatttaaatgtaccacatggcgcgccaactatcatgcgatcgcttcatgtctaactcgagttactggtacgtaccaaatccatggaatcaaggtacctccatgctgtcctactacttgcttcatccccttctacattttgttctggtttttggcctgcatttcggatcatgatgtatgtgatttccaatctgctgcaatatgaatggagactctgtgctaaccatcaacaacatgaaatgcttatgaggcctttgctgagcagccaatcttgcctgtgtttatgtcttcacaggccgaattcctctgttttgtttttcaccctcaatatttggaaacatttatctaggttgtttgtgtccaggcctataaatcatacatgatgttgtcgtattggatgtgaatgtggtggcgtgttcagtgccttggatttgagtttgatgagagttgcttctgggtcaccactcaccattatcgatgctcctcttcagcataaggtaaaagtcttccctgtttacgttattttacccactatggttgcttgggttggttttttcctgattgcttatgccatggaaagtcatttgatatgttgaacttgaattaactgtagaattgtatacatgttccatttgtgttgtacttccttcttttctattagtagcctcagatgagtgtgaaaaaaacagattatataacttgccctataaatcatttgaaaaaaatattgtacagtgagaaattgatatatagtgaatttttaagagcatgttttcctaaagaagtatatattttctatgtacaaaggccattgaagtaattgtagatacaggataatgtagactttttggacttacactgctacctttaagtaacaatcatgagcaatagtgttgcaatgatatttaggctgcattcgtttactctcttgatttccatgagcacgcttcccaaactgttaaactctgtgttttttgccaaaaaaaaatgcataggaaagttgcttttaaaaaatcatatcaatccattttttaagttatagctaatacttaattaatcatgcgctaataagtcactctgtttttcgtactagagagattgttttgaaccagcactcaagaacacagccttaacccagccaaataatgctacaacctaccagtccacacctcttgtaaagcatttgttgcatggaaaagctaagatgacagcaacctgttcaggaaaacaactgacaaggtcatagggagagggagcttttggaaaggtgccgtgcagttcaaacaattagttagcagtagggtgttggtttttgctcacagcaataagaagttaatcatggtgtaggcaacccaaataaaacaccaaaatatgcacaaggcagtttgttgtattctgtagtacagacaaaactaaaagtaatgaaagaagatgtggtgttagaaaaggaaacaatatcatgagtaatgtgtgggcattatgggaccacgaaataaaaagaacattttgatgagtcgtgtatcctcgatgagcctcaaaagttctctcaccccggataagaaacccttaagcaatgtgcaaagtttgcattctccactgacataatgcaaaataagatatcatcgatgacatagcaactcatgcatcatatcatgcctctctcaacctattcattcctactcatctacataagtatcttcagctaaatgttagaacataaacccataagtcacgtttgatgagtattaggcgtgacacatgacaaatcacagactcaagcaagataaagcaaaatgatgtgtacataaaactccagagctatatgtcatattgcaaaaagaggagagcttataagacaaggcatgactcacaaaaattcatttgcctttcgtgtcaaaaagaggagggctttacattatccatgtcatattgcaaaagaaagagagaaagaacaacacaatgctgcgtcaattatacatatctgtatgtccatcattattcatccacctttcgtgtaccacacttcatatatcatgagtcacttcatgtctggacattaacaaactctatcttaacatttagatgcaagagcctttatctcactataaatgcacgatgatttctcattgtttctcacaaaaagcattcagttcattagtcctacaacaacggatcctaaaccatgcgcgtgctgctcgtggccctggccctgctggctcttgctgccagcgccacctctgcccagagcgagccggagctgaagctggagagcgtggtgatcgtgagcaggcacggcgtgagggccccgaccaagttcacccagctgatgcaggacgtgaccccggacgcgttctacacctggccggtgaagctgggcgagctgaccccgaggggcggcgagctgatcgcctacctgggccactactggaggcagaggctggtggccgacggcctgctgccgaagaagggctgcccgcagagcggccaggtggccatcatcgccgacgtggacgagaggaccaggaagaccggtgaggccttcgccgccggcctggccccggactgcgccatcaccgtgcacacccaggccgacaccagcagcccggacccgctgttcaacccgctgaagaccggcgtgtgccagctggacgtggcccaggtgaccgacgccatcctggagagggccggcggcagcatcgccgacttcaccggccactaccagaccgccttcagggagctggagagggtgctgaacttcccgcagagcaacctggccctgaagagggagaagcaggacgagagcgccagcctgacccaggccctgccgagcgagctgaaggtgagcgccgacaacgtgagcctgaccggcgcctggagcctggccagcatgctgaccgagattttcctgctgcagcaggcccagggcatgccggagccgggctggggcaggatcaccgacagccaccagtggaacaccctgctgagcctgcacaacgcccagttcgacctgctgcagaggaccccggaggtggccaggagcagggccaccccgctgctggacctgatcaagaccgccctgaccccgcacccgccgcagaagcaggcctacggcgtgaccctgccgaccagcgtgctgttcatcgccggccacgacaccaacctggccaacctgggcggcgccctcgagctgcagtggaccctgccgggccagccggacaacaccccgccgggcggcgagctggtgttcgagaggtggaggaggctgagcgacaacagccagtggattcaggtgagcctggtgttccagaccctgcagcagatgagggacaagaccccgctgttcctgaacaccccgccgggcgaggtgaagctgaccctggccggctgcgaggagaggaacgcccagggcatgtgcagcctggccggcttcacccagatcgtgaacgaggccaggattccggcctgcagcctgagcgagaaggacgagctgtgacctaggtccccgaatttccccgatcgttcaaacatttggcaataaagtttcttaagattgaatcctgttgccggtcttgcgatgattatcatataatttctgttgaattacgttaagcatgtaataattaacatgtaatgcatgacgttatttatgagatgggtttttatgattagagtcccgcaattatacatttaatacgcgatagaaaacaaaatatagcgcgcaaactaggataaattatcgcgcgcggtgtcatctatgttactagatcgggaattgggtaccaaagtaatcatattattttatgtgtgaatcttctttactttttcatttgattatgattatgaaggtatgaccttcataaccttcgtccgaaatccattatatccaaaggaaaataatgcttcgaaggacgaaggattttgatatttaacattttatgttgccttgttcttaattcatagcatttgagaacaagtccccaacaccaatctttatctttactatattaaagcaccagttcaacgatcgtctcgtgtcaatattattaaaaaactcctacatttctttataatcaacccgcactcttataatctcttctcttactactataataagagagtttatgtacaaaataaggtgaaattatgtataagtgttctggaccttggttgttggctcatattcacacaacctaatcaatagaaaacatatgttttattaaaacaaaatttatcatatatatatatatatatatatatatatatatatatatatataatataaaccgtagcaatgcacaggcatatgactagtggcaacttaataccatgtgtgtattaagatgaataagaggtatccaaataaataacttgttcgcttacgtctggatcgaaaggggttggaaacgattaaatctcttcctagtcaaaattaaatagaaggagatttaatcgatttctcccaatccccttcgatccaggtgcaaccgaataagtccttaaatgttgaggaacacgaaacaaccatgcattggcatgtaaagctccaagaattcgttgtatccttaacaactcacagaacatcaaccaaaattgcacgtcaagggtattgggtaagaaacaatcaaacaaatcctctctgtgtgcaaagaaacacggtgagtcatgccgagatcatactcatctgatatacatgcttacagctcacaagacattacaaacaactcatattgcattacaaagatcgtttcatgaaaaataaaataggccggaacaggacaaaaatccttgacgtgtaaagtaaatttacaacaaaaaaaaagccatatgtcaagctaaatctaattcgttttacgtagatcaacaacctgtagaaggcaacaaaactgagccacgcagaagtacagaatgattccagatgaaccatcgacgtgctacgtaaagagagtgacgagtcatatacatttggcaagaaaccatgaagctgcctacagccgtctcggtggcataagaacacaagaaattgtgttaattaatcaaagctataaataacgctcgcatgcctgtgcacttctccatcaccaccactgggtcttcagaccattagctttatctactccagagcgcagaagaacccgatcgacaccggatcctaaaccatgcgcgtgctgctcgtggccctggccctgctggctcttgctgccagcgccacctctgcccagagcgagccggagctgaagctggagagcgtggtgatcgtgagcaggcacggcgtgagggccccgaccaagttcacccagctgatgcaggacgtgaccccggacgcgttctacacctggccggtgaagctgggcgagctgaccccgaggggcggcgagctgatcgcctacctgggccactactggaggcagaggctggtggccgacggcctgctgccgaagaagggctgcccgcagagcggccaggtggccatcatcgccgacgtggacgagaggaccaggaagaccggtgaggccttcgccgccggcctggccccggactgcgccatcaccgtgcacacccaggccgacaccagcagcccggacccgctgttcaacccgctgaagaccggcgtgtgccagctggacgtggcccaggtgaccgacgccatcctggagagggccggcggcagcatcgccgacttcaccggccactaccagaccgccttcagggagctggagagggtgctgaacttcccgcagagcaacctggccctgaagagggagaagcaggacgagagcgccagcctgacccaggccctgccgagcgagctgaaggtgagcgccgacaacgtgagcctgaccggcgcctggagcctggccagcatgctgaccgagattttcctgctgcagcaggcccagggcatgccggagccgggctggggcaggatcaccgacagccaccagtggaacaccctgctgagcctgcacaacgcccagttcgacctgctgcagaggaccccggaggtggccaggagcagggccaccccgctgctggacctgatcaagaccgccctgaccccgcacccgccgcagaagcaggcctacggcgtgaccctgccgaccagcgtgctgttcatcgccggccacgacaccaacctggccaacctgggcggcgccctcgagctgcagtggaccctgccgggccagccggacaacaccccgccgggcggcgagctggtgttcgagaggtggaggaggctgagcgacaacagccagtggattcaggtgagcctggtgttccagaccctgcagcagatgagggacaagaccccgctgttcctgaacaccccgccgggcgaggtgaagctgaccctggccggctgcgaggagaggaacgcccagggcatgtgcagcctggccggcttcacccagatcgtgaacgaggccaggattccggcctgcagcctgagcgagaaggacgagctgtgacctaggtccccgaatttccccgatcgttcaaacatttggcaataaagtttcttaagattgaatcctgttgccggtcttgcgatgattatcatataatttctgttgaattacgttaagcatgtaataattaacatgtaatgcatgacgttatttatgagatgggtttttatgattagagtcccgcaattatacatttaatacgcgatagaaaacaaaatatagcgcgcaaactaggataaattatcgcgcgcggtgtcatctatgttactagatcgggaattgggtacccggtatgaatttggaaacaaattcagtacttttaaaaaaatttgttgtagggagcaaataatacataaaataatttatgcattattttattttttatttgtaataatatgcttgaaacgataattcagtatgcatgttgtgccagtgtactacacgggcggggggaggggattgagtgggccagcgcggtgcgtagggtagatgggctgaaattgataactcaagtccgactaggttctctttttatttcccttccttttctattttcctttcttttaattttcatgctttcaaactaaattcaaattcgagttttgaatttcagcttctaaattgtacactaaaattatatgataaggtaacccctactattacttttaatttttttattctaccccatattgtttacttaggggagaataattgacttaatcacattcttccttaggtttcaattctcaatctttcaaatccacatttttagatttctattttgaatttaaataccagtttggatttagagttcaatttcaaaatacacaaccaaaataccagcatgaatgcaaatatattttatgtttatgtatttacttttcttttatactttgctcaaaatagttattttcatgtatgaaactcaataagcaaggaactcacgttattatataacctaataggaataatttaggtaacataatttatcatcctcttgatttaaaagagatatgcctccagaataagacacatactaaaaataactctaatattgaataactaaagtcgtacaaatctctactattattcctataaaataataaagaactagctacaacttctttaaggcattattcagggtttacagcttgagaggcatgaacccatcctgtatactcctggacttggaagacaaaatgtcaaccaaagtgaaaggttttcttatggttgctgctaagagatagattgaacactagatctctcctaagacgtcagggcatgcgtttagactcctacacatgcgaaaactgcatcttacagttggaagaaactatatctcaccacttcctgcggtgtaactttgcccaaagatgttggctcactgttggaatcactccgccccgaactttggatctaacgcttgcagtgctacatattagagcaagactaacaatgccgtggagaatggaaggtattataaccatgtcatggtgcatatggaaatgtcgaaataactggatattcgaaaacataccgccaacggtggcggcctgcaaggaaatgttcaagactgaaatgaactacatctgctaccaagttaagctcgagacaggagctaaaagtagaaactggatacaacactttgtaacatagtgacactccccttttcctttcttttaccttagaactatacatacaatccacattcaataaaaatttgtaggtacgccatacacactaccggaatccggctctttgccgagtgtgaggcgctttgtcgagtgctttttgtccagcactcggcaaaaaagtctttgccatgtgccgcactcggcaaagtcctgctctcggtaacgaccgcgtttaccgagagcaggactctcgacacagaaatacactcgacaaagaaatctttgccgagagccaaacactcggcgaacggcagcgctcggcaaagggtcgtcagccgccgtctaaagctgacggtcgttatctttgtcgagtgccccctcgtccgacactcagtagagcaagcttgccgagtgccatccttggacactcgataaagtatattttatttttttttattttgccaaccaaactttttgtggtatgttcctacactatgtagatctacatgtaccattttggcacaattacaaaaatgttttctataactattagatttagttcgtttatttgaatttcttcggaaaattcacatatgaactgcaagtcactcgaaacatgaaaaaccgtgcatgcaaaataaatgatatgcatgttatctagcacaagttacgaccgaattcagaagcagaccagaatcttcaagcaccatgctcactaaacatgaccgtgaacttgttatccagttgtttaaaaattgtataaaacacaaataaagtcagaaattaatgaaacttgtccacatgtcatgatatcatatatagaggttgtgataaaaatttgataatgtttcggtaaagttgtgacgtactatgtgtagaaacctaagtgacctacacataaaatcatagagtttcaatgtagttcactcgacaaagactttgtcaagtgtccgataaaaagtattcagcaaagaagccgttgtcgatttactgttcgtcgagatctctttgccgagtgtcacactaggcaaagtctttacggagtgtttttcaggctttgacactcggcaaagcgctcgattccagtagtgacagtaatttgcatcaaaaatagccgagagatttaaaatgagtcaactaatagaccaactaattattagctattagtcgttagcttctttaatctaagctaaaaccaactaatagcttatttgttgaattacaattagctcaacggaattctctgttttttctataaaaaaaagggaaactgcccctcatttacagcaaactgtccgctgcctgtcgtccagatacaatgaacgtacctagtaggaactcttttacacgctcggtcgctcgccgcggatcggagtcccaggaacacgacaccactgtggaacacgacaaagtctgctcagaggcggccacaccctggcgtgcaccgagccggagcccggataagcacggtaaggagagtacggcgggacgtggcgacccgtgtgtctgctgccacgcagccttcctccacgtagccgcgcggccgcgccacgtaccagggcccggcgctggtataaatgcgcgccacctccgctttagttctgcatacagccaacccaacacacacccgagcatatcacagtgacagacactacacgggatcctaaaccatgcgcgtgctgctcgtggccctggccctgctggctcttgctgccagcgccacctctgcccagagcgagccggagctgaagctggagagcgtggtgatcgtgagcaggcacggcgtgagggccccgaccaagttcacccagctgatgcaggacgtgaccccggacgcgttctacacctggccggtgaagctgggcgagctgaccccgaggggcggcgagctgatcgcctacctgggccactactggaggcagaggctggtggccgacggcctgctgccgaagaagggctgcccgcagagcggccaggtggccatcatcgccgacgtggacgagaggaccaggaagaccggtgaggccttcgccgccggcctggccccggactgcgccatcaccgtgcacacccaggccgacaccagcagcccggacccgctgttcaacccgctgaagaccggcgtgtgccagctggacgtggcccaggtgaccgacgccatcctggagagggccggcggcagcatcgccgacttcaccggccactaccagaccgccttcagggagctggagagggtgctgaacttcccgcagagcaacctggccctgaagagggagaagcaggacgagagcgccagcctgacccaggccctgccgagcgagctgaaggtgagcgccgacaacgtgagcctgaccggcgcctggagcctggccagcatgctgaccgagattttcctgctgcagcaggcccagggcatgccggagccgggctggggcaggatcaccgacagccaccagtggaacaccctgctgagcctgcacaacgcccagttcgacctgctgcagaggaccccggaggtggccaggagcagggccaccccgctgctggacctgatcaagaccgccctgaccccgcacccgccgcagaagcaggcctacggcgtgaccctgccgaccagcgtgctgttcatcgccggccacgacaccaacctggccaacctgggcggcgccctcgagctgcagtggaccctgccgggccagccggacaacaccccgccgggcggcgagctggtgttcgagaggtggaggaggctgagcgacaacagccagtggattcaggtgagcctggtgttccagaccctgcagcagatgagggacaagaccccgctgttcctgaacaccccgccgggcgaggtgaagctgaccctggccggctgcgaggagaggaacgcccagggcatgtgcagcctggccggcttcacccagatcgtgaacgaggccaggattccggcctgcagcctgagcgagaaggacgagctgtgacctaggtccccgaatttccccgatcgttcaaacatttggcaataaagtttcttaagattgaatcctgttgccggtcttgcgatgattatcatataatttctgttgaattacgttaagcatgtaataattaacatgtaatgcatgacgttatttatgagatgggtttttatgattagagtcccgcaattatacatttaatacgcgatagaaaacaaaatatagcgcgcaaactaggataaattatcgcgcgcggtgtcatctatgttactagatcgggaattggaattcctgcagtgcagcgtgacccggtcgtgcccctctctagagataatgagcattgcatgtctaagttataaaaaattaccacatattttttttgtcacacttgtttgaagtgcagtttatctatctttatacatatatttaaactttactctacgaataatataatctatagtactacaataatatcagtgttttagagaatcatataaatgaacagttagacatggtctaaaggacaattgagtattttgacaacaggactctacagttttatctttttagtgtgcatgtgttctcctttttttttgcaaatagcttcacctatataatacttcatccattttattagtacatccatttagggtttagggttaatggtttttatagactaatttttttagtacatctattttattctattttagcctctaaattaagaaaactaaaactctattttagtttttttatttaataatttagatataaaatagaataaaataaagtgactaaaaattaaacaaataccctttaagaaattaaaaaaactaaggaaacatttttcttgtttcgagtagataatgccagcctgttaaacgccgtcgacgagtctaacggacaccaaccagcgaaccagcagcgtcgcgtcgggccaagcgaagcagacggcacggcatctctgtcgctgcctctggacccctctcgagagttccgctccaccgttggacttgctccgctgtcggcatccagaaattgcgtggcggagcggcagacgtgagccggcacggcaggcggcctcctcctcctctcacggcacggcagctacgggggattcctttcccaccgctccttcgctttcccttcctcgcccgccgtaataaatagacaccccctccacaccctctttccccaacctcgtgttgttcggagcgcacacacacacaaccagatctcccccaaatccacccgtcggcacctccgcttcaaggtacgccgctcgtcctccccccccccccctctctaccttctctagatcggcgttccggtccatggttagggcccggtagttctacttctgttcatgtttgtgttagatccgtgtttgtgttagatccgtgctgctagcgttcgtacacggatgcgacctgtacgtcagacacgttctgattgctaacttgccagtgtttctctttggggaatcctgggatggctctagccgttccgcagacgggatcgatttcatgattttttttgtttcgttgcatagggtttggtttgcccttttcctttatttcaatatatgccgtgcacttgtttgtcgggtcatcttttcatgcttttttttgtcttggttgtgatgatgtggtctggttgggcggtcgttctagatcggagtagaattctgtttcaaactacctggtggatttattaattttggatctgtatgtgtgtgccatacatattcatagttacgaattgaagatgatggatggaaatatcgatctaggataggtatacatgttgatgcgggttttactgatgcatatacagagatgctttttgttcgcttggttgtgatgatgtggtgtggttgggcggtcgttcattcgttctagatcggagtagaatactgtttcaaactacctggtgtatttattaattttggaactgtatgtgtgtgtcatacatcttcatagttacgagtttaagatggatggaaatatcgatctaggataggtatacatgttgatgtgggttttactgatgcatatacatgatggcatatgcagcatctattcatatgctctaaccttgagtacctatctattataataaacaagtatgttttataattattttgatcttgatatacttggatgatggcatatgcagcagctatatgtggatttttttagccctgccttcatacgctatttatttgcttggtactgtttcttttgtcgatgctcaccctgttgtttggtgttacttctgcagatgcagaaactcattaactcagtgcaaaactatgcctggggcagcaaaacggcgttgactgaactttatggtatggaaaatccgtccagccagccgatggccgagctgtggatgggcgcacatccgaaaagcagttcacgagtgcagaatgccgccggagatatcgtttcactgcgtgatgtgattgagagtgataaatcgactctgctcggagaggccgttgccaaacgctttggcgaactgcctttcctgttcaaagtattatgcgcagcacagccactctccattcaggttcatccaaacaaacacaattctgaaatcggttttgccaaagaaaatgccgcaggtatcccgatggatgccgccgagcgtaactataaagatcctaaccacaagccggagctggtttttgcgctgacgcctttccttgcgatgaacgcgtttcgtgaattttccgagattgtctccctactccagccggtcgcaggtgcacatccggcgattgctcactttttacaacagcctgatgccgaacgtttaagcgaactgttcgccagcctgttgaatatgcagggtgaagaaaaatcccgcgcgctggcgattttaaaatcggccctcgatagccagcagggtgaaccgtggcaaacgattcgtttaatttctgaattttacccggaagacagcggtctgttctccccgctattgctgaatgtggtgaaattgaaccctggcgaagcgatgttcctgttcgctgaaacaccgcacgcttacctgcaaggcgtggcgctggaagtgatggcaaactccgataacgtgctgcgtgcgggtctgacgcctaaatacattgatattccggaactggttgccaatgtgaaattcgaagccaaaccggctaaccagttgttgacccagccggtgaaacaaggtgcagaactggacttcccgattccagtggatgattttgccttctcgctgcatgaccttagtgataaagaaaccaccattagccagcagagtgccgccattttgttctgcgtcgaaggcgatgcaacgttgtggaaaggttctcagcagttacagcttaaaccgggtgaatcagcgtttattgccgccaacgaatcaccggtgactgtcaaaggccacggccgtttagcgcgtgtttacaacaagctgtaagagcttactgaaaaaattaacatctcttgctaagctgggagctctagatccccgaatttccccgatcgttcaaacatttggcaataaagtttcttaagattgaatcctgttgccggtcttgcgatgattatcatataatttctgttgaattacgttaagcatgtaataattaacatgtaatgcatgacgttatttatgagatgggtttttatgattagagtcccgcaattatacatttaatacgcgatagaaaacaaaatatagcgcgcaaactaggataaattatcgcgcgcggtgtcatctatgttactagatcgggaattggcgagctcgaattaattcagtacattaaaaacgtccgcaatgtgttattaagttgtctaagcgtcaatttgtttacaccacaatttgtttcaaacactgatagtttaaactgaaggcgggaaacgacaacctgatcatgagcggagaattaagggagtcacgttatgacccccgccgatgacgcgggacaagccgttttacgtttggaactgacagaaccgcaacgttgaaggagccactcagcctaagcggccgcattggacttaattaagtgaggccggccaagcgtcgatttaaatgtaccacatggcgcgccaactatcatgcgatcgcttcatgtctaactcgagttactggtacgtaccaaatccatggaatcaaggtacctccatgctgtcctactacttgcttcatccccttctacattttgttctggtttttggcctgcatttcggatcatgatgtatgtgatttccaatctgctgcaatatgaatggagactctgtgctaaccatcaacaacatgaaatgcttatgaggcctttgctgagcagccaatcttgcctgtgtttatgtcttcacaggccgaattcctctgttttgtttttcaccctcaatatttggaaacatttatctaggttgtttgtgtccaggcctataaatcatacatgatgttgtcgtattggatgtgaatgtggtggcgtgttcagtgccttggatttgagtttgatgagagttgcttctgggtcaccactcaccattatcgatgctcctcttcagcataaggtaaaagtcttccctgtttacgttattttacccactatggttgcttgggttggttttttcctgattgcttatgccatggaaagtcatttgatatgttgaacttgaattaactgtagaattgtatacatgttccatttgtgttgtacttccttcttttctattagtagcctcagatgagtgtgaaaaaaacagattatataacttgccctataaatcatttgaaaaaaatattgtacagtgagaaattgatatatagtgaatttttaagagcatgttttcctaaagaagtatatattttctatgtacaaaggccattgaagtaattgtagatacaggataatgtagactttttggacttacactgctacctttaagtaacaatcatgagcaatagtgttgcaatgatatttaggctgcattcgtttactctcttgatttccatgagcacgcttcccaaactgttaaactctgtgttttttgccaaaaaaaaatgcataggaaagttgcttttaaaaaatcatatcaatccattttttaagttatagctaatacttaattaatcatgcgctaataagtcactctgtttttcgtactagagagattgttttgaaccagcactcaagaacacagccttaacccagccaaataatgctacaacctaccagtccacacctcttgtaaagcatttgttgcatggaaaagctaagatgacagcaacctgttcaggaaaacaactgacaaggtcatagggagagggagcttttggaaaggtgccgtgcagttcaaacaattagttagcagtagggtgttggtttttgctcacagcaataagaagttaatcatggtgtaggcaacccaaataaaacaccaaaatatgcacaaggcagtttgttgtattctgtagtacagacaaaactaaaagtaatgaaagaagatgtggtgttagaaaaggaaacaatatcatgagtaatgtgtgggcattatgggaccacgaaataaaaagaacattttgatgagtcgtgtatcctcgatgagcctcaaaagttctctcaccccggataagaaacccttaagcaatgtgcaaagtttgcattctccactgacataatgcaaaataagatatcatcgatgacatagcaactcatgcatcatatcatgcctctctcaacctattcattcctactcatctacataagtatcttcagctaaatgttagaacataaacccataagtcacgtttgatgagtattaggcgtgacacatgacaaatcacagactcaagcaagataaagcaaaatgatgtgtacataaaactccagagctatatgtcatattgcaaaaagaggagagcttataagacaaggcatgactcacaaaaattcatttgcctttcgtgtcaaaaagaggagggctttacattatccatgtcatattgcaaaagaaagagagaaagaacaacacaatgctgcgtcaattatacatatctgtatgtccatcattattcatccacctttcgtgtaccacacttcatatatcatgagtcacttcatgtctggatacacgactgatagtttaaactgaaggcgggaaacgacaacctgatcatgagcggagaattaagggagtcacgttatgacccccgccgatgacgcgggacaagccgttttacgtttggaactgacagaaccgcaacgttgaaggagccactcagcctaagcggccgcattggacttaattaagtgaggccggccaagcgtcgatttaaatgtaccacatggcgcgccaactatcatgcgatcgcttcatgtctaactcgagttactggtacgtaccaaatccatggaatcaaggtacctccatgctgtcctactacttgcttcatccccttctacattttgttctggtttttggcctgcatttcggatcatgatgtatgtgatttccaatctgctgcaatatgaatggagactctgtgctaaccatcaacaacatgaaatgcttatgaggcctttgctgagcagccaatcttgcctgtgtttatgtcttcacaggccgaattcctctgttttgtttttcaccctcaatatttggaaacatttatctaggttgtttgtgtccaggcctataaatcatacatgatgttgtcgtattggatgtgaatgtggtggcgtgttcagtgccttggatttgagtttgatgagagttgcttctgggtcaccactcaccattatcgatgctcctcttcagcataaggtaaaagtcttccctgtttacgttattttacccactatggttgcttgggttggttttttcctgattgcttatgccatggaaagtcatttgatatgttgaacttgaattaactgtagaattgtatacatgttccatttgtgttgtacttccttcttttctattagtagcctcagatgagtgtgaaaaaaacagattatataacttgccctataaatcatttgaaaaaaatattgtacagtgagaaattgatatatagtgaatttttaagagcatgttttcctaaagaagtatatattttctatgtacaaaggccattgaagtaattgtagatacaggataatgtagactttttggacttacactgctacctttaagtaacaatcatgagcaatagtgttgcaatgatatttaggctgcattcgtttactctcttgatttccatgagcacgcttcccaaactgttaaactctgtgttttttgccaaaaaaaaatgcataggaaagttgcttttaaaaaatcatatcaatccattttttaagttatagctaatacttaattaatcatgcgctaataagtcactctgtttttcgtactagagagattgttttgaaccagcactcaagaacacagccttaacccagccaaataatgctacaacctaccagtccacacctcttgtaaagcatttgttgcatggaaaagctaagatgacagcaacctgttcaggaaaacaactgacaaggtcatagggagagggagcttttggaaaggtgccgtgcagttcaaacaattagttagcagtagggtgttggtttttgctcacagcaataagaagttaatcatggtgtaggcaacccaaataaaacaccaaaatatgcacaaggcagtttgttgtattctgtagtacagacaaaactaaaagtaatgaaagaagatgtggtgttagaaaaggaaacaatatcatgagtaatgtgtgggcattatgggaccacgaaataaaaagaacattttgatgagtcgtgtatcctcgatgagcctcaaaagttctctcaccccggataagaaacccttaagcaatgtgcaaagtttgcattctccactgacataatgcaaaataagatatcatcgatgacatagcaactcatgcatcatatcatgcctctctcaacctattcattcctactcatctacataagtatcttcagctaaatgttagaacataaacccataagtcacgtttgatgagtattaggcgtgacacatgacaaatcacagactcaagcaagataaagcaaaatgatgtgtacataaaactccagagctatatgtcatattgcaaaaagaggagagcttataagacaaggcatgactcacaaaaattcatttgcctttcgtgtcaaaaagaggagggctttacattatccatgtcatattgcaaaagaaagagagaaagaacaacacaatgctgcgtcaattatacatatctgtatgtccatcattattcatccacctttcgtgtaccacacttcatatatcatgagtcacttcatgtctggacattaacaaactctatcttaacatttagatgcaagagcctttatctcactataaatgcacgatgatttctcattgtttctcacaaaaagcattcagttcattagtcctacaacaacggatcctaaaccatgcgcgtgctgctcgtggccctggccctgctggctcttgctgccagcgccacctctgcccagagcgagccggagctgaagctggagagcgtggtgatcgtgagcaggcacggcgtgagggccccgaccaagttcacccagctgatgcaggacgtgaccccggacgcgttctacacctggccggtgaagctgggcgagctgaccccgaggggcggcgagctgatcgcctacctgggccactactggaggcagaggctggtggccgacggcctgctgccgaagaagggctgcccgcagagcggccaggtggccatcatcgccgacgtggacgagaggaccaggaagaccggtgaggccttcgccgccggcctggccccggactgcgccatcaccgtgcacacccaggccgacaccagcagcccggacccgctgttcaacccgctgaagaccggcgtgtgccagctggacgtggcccaggtgaccgacgccatcctggagagggccggcggcagcatcgccgacttcaccggccactaccagaccgccttcagggagctggagagggtgctgaacttcccgcagagcaacctggccctgaagagggagaagcaggacgagagcgccagcctgacccaggccctgccgagcgagctgaaggtgagcgccgacaacgtgagcctgaccggcgcctggagcctggccagcatgctgaccgagattttcctgctgcagcaggcccagggcatgccggagccgggctggggcaggatcaccgacagccaccagtggaacaccctgctgagcctgcacaacgcccagttcgacctgctgcagaggaccccggaggtggccaggagcagggccaccccgctgctggacctgatcaagaccgccctgaccccgcacccgccgcagaagcaggcctacggcgtgaccctgccgaccagcgtgctgttcatcgccggccacgacaccaacctggccaacctgggcggcgccctcgagctgcagtggaccctgccgggccagccggacaacaccccgccgggcggcgagctggtgttcgagaggtggaggaggctgagcgacaacagccagtggattcaggtgagcctggtgttccagaccctgcagcagatgagggacaagaccccgctgttcctgaacaccccgccgggcgaggtgaagctgaccctggccggctgcgaggagaggaacgcccagggcatgtgcagcctggccggcttcacccagatcgtgaacgaggcgatggttctaggcggtgacgtggaagaggtggcgagatcctaggcgatgggggcgaaaactgcaaggtcctaggccatggtagcggtgggaggcgaggtgaagcgcaatggacatagcattctttttgtgattcggtatgggagggagtgtgtaaatagtagcaatacgggtaattaccctacaactccaagaggaggtacaaaataatgattcctggggcaccccttggagctccacaaaaaactgaagttgaggctaggtcctcatttttttatggcgccagagttgaaggtggtttcgttgatgcgatatattaaaaaattacattaccgcctaacatatgaaggattgactatacaacgtcctcaactataaacttaatattatagctacatctaaaattatttaaatggctctctagatggtcttgtaggaccgtttggacaccatatccaattacattgactcatgcatttatacttgcacacatgcacatcggttgtctccatcttcctactatttaaaggtctaccgaacaaatatccgtcaagcaacccaggaggcgatgttgtcgagcaacctactcatcgagcaacccaataaggcgaggctgccgagcgatctgcctgccaagtaacccaccaaggcggggttgccgaacaacctgcccgccgagcaacccagccaaccaaccggtcctccgagcaacctagcaaaacgacagtcgactcataggaagagtcggcctggtacaatcaagccacgacaacatgacgagacatcatcgagccagatccagaccgtgaaaacggcactgagggatctttgtcaaacatgacgacggatacgtatccctgctgacacatgtgaccggacgaccccgaccgtagaaacctcagcatcggggtttctacagtgacccatacaccggaagggatgagacaatatgtcgtatcaagcgtgcatctacgtatgatgaaagatgacgctgctcggaggatgacagaagatgaagttgtatgaacacatccctaaagcactcattgagctgactcaacagaaactaccaggcactgccacgtctaaatcagagtagctataggaaggcggacaggacgtgacgccataccaggggtacggcgcacgcctcgactaacgactctacaagggctacgaggcccaaaagcgtgacccaacagacgagaccaccggggctacgaggcctagaagcaggataccaaactctaccctagtagaatactagtcctcattgtaacgtctatccttggactataaaagggcaatacaaccctcatccaaacatgatcccgtatctctacaacttcacacaagcactcagctgtaacacgttccatcattgtattgtctacccttgggctataaaagggcaagacaacccccatccaaacatgatcctgtatactcagctgtaacacgttccaagcaatatcacaatcagcactgcactggactagggctccggtctgaactagtataaccagcccgcctcagatccacacccatagctcaccattcgaagtgagtccgtgctaacactcccgccgaatacaaatcttattgtccactggttccagaaaccacgacacttatcttaaaaacttatgtttcaacttaatacatattgaagatagtaaaggtgcaatgcaaatgatagcaacaaatatagaatgattggtaaaattatttattagaactaaatagaacatgtatggtatgtacatgggtagagttatgaaataaagagaataaatataattaattttgagtagttatgcatattttaaaaaaccatatagatttatgtgacgcaagattccagacagtgttgaaatgcctttatttgacaatgtttatagagtgataaacatggcaaatagaccatgagatggttatatgagcaagatagtgcttcccgcgcatgtgttcgttactctcccatgtgttccggtccttcgacagcaaacacttaaagcatggacttaacaaagtgcagtaatgcggtctcattatagcacaccccccacataaaaaaacaatatccgcagctagaagacaacacacagcctaagcacgttcagccgaggccaagcaatccgcatccgccccagcccccagcagccctcaccaaccatcattgtgtgtagttgttgggagaggggagggccttgacgaatgacgaggaccaaccacagccccgccgctacagagctacccgccccaacggcgaccaggaagtttccacgccgctggccttgtgacatgcgcacattgtcttggtcgtctttggacaagtctcgactctccacaccaccagcccggtcccttctcagaagcattagctatttaaacctcgccactcctgctggttctctccaggaagagcagcactagatctctctcccctacagcttcccagcaagccagttgcatacatttcactgctgttatctttctcagcttgatcagtgctttagttctctctagttgcaatggcttgcgatttcccgtgcatggcgacgccccgcgccgacccgcttaactgggggaaggcggcggaggagctgatgggcagccacctggacgaggtcaagcggatggtggccgagtaccgccaaccctcggtgaagatcgagggcgccagcctcagcatcgcgcaggtggccgctgtggccaccggcgctggcgaggctcgggtcgagctggacgagtccgcccgtagccgggtcaaggcaagcagcgactgggtcatgagcagcatgatgaacggcaccgacagctacggcgtcaccaccggcttcggcgccacgttgcacaggaggaccaaggagggcggcgctctccagagggagctcatcaggttcctcaacgctggcgccttcggcaccggcacggacggccacgtcctcccggccgaggcgacgcgcgcggccatgctcgtccgcatcaacaccctcctccaggggtactccgggatccgcttcgagatcctcgaggcgatcgtcaagctgctcaacgccaacgtcacgccgtgcctgccgctccgcggcacggtcaccgcgtccggcgacctcgtgccgctctcctacattgccggcctcgtcaccgggcgtgagaactctgttgccctcgccccagacggcagcaaggtgaacgccgccgaggcattcaagattgccggaatccagggcggcttcttcgagctgcagcccaaggagggtcttgcgatggtgaacggcacggccgtgggctctggcctcgcctccactgtgctcttcgaggctaacatccttgccatcctcgccgaggtcctgtccgccgtgttctgcgaagtcatgaacggcaagccggagtacaccgaccacctgacccacaagctcaagcaccacccgggacagatcgaggctgctgccatcatggagcacatcttggagggcagctcctacatgaagctt

SEQ ID NO: 126 - DNA, 231 bp, Artificial Sequence
  Synthetic construct, PY15_688+580
tcgacttggaggaggatgcacaatgaatatgtatggcacacacatacagatccaaaattaataaatccaccaggtagtttgaaacagaattctactccgatctagaacgaccgcccaaccagaccacatcatcacaaccaagacaaaaaaaagcatgaaaagatgacccgacaaacaagtgcacggcatatattgaaataaaggaaaagggcaaaccaaaccctatgcaac

SEQ ID NO: 127 - DNA, 122 bp, Artificial Sequence
  Synthetic construct, PY15_688+732
tggctaggacttgcagttttcgcccccatcgccgaggatctcgccacctcttccacatcaccgcctagaacctcgctatcggcggggcgactttccccattgtgcatcctcctccaagtcga

SEQ ID NO: 128 - DNA, 186 bp, Artificial Sequence
  Synthetic construct, PY203-3293_696+516
caccaaccttctggcatttgagaattcatctcatccaaaaacttctataatatatcattcagtgtcaggcctctcccttggctagggctaggagaggttctagtaacttggggaagcactgatagttaaaactgaaggcgggaaacgacaacctgatcatgagcggagaattaagggagtcacgtt

SEQ ID NO: 129 - DNA, 278 bp, Artificial Sequence
  Synthetic construct, PY203-3293_696+620
caccaaccttctggcatttgagaattcatctcatccaaaaacttctataatatatcattcagtgtcaggcctctcccttggctagggctaggagaggttctagtaacttggggggctaagagcgatggctctattatagtggacctcgaagtctatctttcgagcagaaatttttgaatgcgtattagtggcagatggatgaatgtctggcctttcccaaacgttaacaagcatatgcattttcaaatattactttcaaatgtttcagcttggcaatc

SEQ ID NO: 130 - DNA, 163 bp, Artificial Sequence
  Synthetic construct, PY203-3293_696+504
caccaaccttctggcatttgagaattcatctcatccaaaaacttctataatatatcattcagtgtcaggcctctcccttggctagggctaggagaggttctagtaacttggggaagcactgatagttaaaactgaaggcgggaaacgacaacctgatcatgag

SEQ ID NO: 131 - DNA, 136 bp, Artificial Sequence
  Synthetic construct, PY203-3507_666+516
aatctgggccgctatttccctgacctcacaaccagccgcaaaggcgcggtggacatcctcctcaaacactgatagtttaaactgaaggcgggaaacgacaacctgatcatgagcggagaattaagggagtcacgtt

SEQ ID NO: 132 - DNA, 104 bp, Artificial Sequence
  Synthetic construct, PY203-3507_666+667
aatctgggccgctatttccctgacctcacaaccagccgcaaaggcgcggtggacatcctcctcagaacgatgttccagcaggaaatcaatgactaagacaaggc

SEQ ID NO: 133 - DNA, 113 bp, Artificial Sequence
  Synthetic construct, PY203-3507_747+504
aatctgggccgctatttccctgacctcacaaccagccgcaaaggcgcggtggacatcctcctcaaacactgatagtttaaactgaaggcgggaaacgacaacctgatcatgag

SEQ ID NO: 134 - DNA, 124 bp, Artificial Sequence
  Synthetic construct, PY203-3507_747+753
aatctgggccgctatttccctgacctcacaaccagccgcaaaggcgcggtggacatcctcctcagaacgatgttccagcaggaaatcaatgactaagacaaggcgagccactaggcgtgtgaaa

SEQ ID NO: 135 - DNA, 377 bp, Artificial Sequence
  Synthetic construct, PY53_784+511
gccttgtagccttcttgagtataagtttggtattcggtttttaccgaaaaaaccaaagtaaaaaaccgaaaccgaacttatcggtttttcattttctagaaaaccgatcggcttctaatatttgaaaccccgaagttttttaaaaccaaagaaccgaaccgaagtttcaaaaaaccgaatgccaaccctattgaagagcatcatttatgggtgaggttaggttggtaattttgtaccatgagttgtgggtagggatatattgtggtgtaaacaaattgacgcttagacaacttaataacacattgcggacgtttttaatgtactgaattaattcgagctcgccaattcccgatctagtaacatagatgacaccgcgc

SEQ ID NO: 136 - DNA, 158 bp, Artificial Sequence
  Synthetic construct, PY53_511+779
gcgcggtgtcatctatgttactagatcgggaattggcgagctcgaattaattcagtacattaaaaacgtccgcaatgtgttattaagttgtctaagcgtcaatttgtttacaccacaatatatgaatttatgaatcggattggattaggatcgggctc

SEQ ID NO: 137 - DNA, 319 bp, Artificial Sequence
  Synthetic construct, PY53_784+779
gccttgtagccttcttgagtataagtttggtattcggtttttaccgaaaaaaccaaagtaaaaaaccgaaaccgaacttatcggtttttcattttctagaaaaccgatcggcttctaatatttgaaaccccgaagttttttaaaaccaaagaaccgaaccgaagtttcaaaaaaccgaatgccaaccctattgaagagcatcatttatgggtgaggttaggttggtaattttgtaccatgagttgtgggtaggggtggtaatgggctctaaatttttcactataaaatttatgaatcggattggattaggatcgggctc

SEQ ID NO: 138 - DNA, 5189 bp, Artificial Sequence
  Synthetic construct, pAG4904
cggtatgaatttggaaacaaattcagtacttttaaaaaaatttgttgtagggagcaaataatacataaaataatttatgcattattttattttttatttgtaataatatgcttgaaacgataattcagtatgcatgttgtgccagtgtactacacgggcggggggaggggattgagtgggccagcgcggtgcgtagggtagatgggctgaaattgataactcaagtccgactaggttctctttttatttcccttccttttctattttcctttcttttaattttcatgctttcaaactaaattcaaattcgagttttgaatttcagcttctaaattgtacactaaaattatatgataaggtaacccctactattacttttaatttttttattctaccccatattgtttacttaggggagaataattgacttaatcacattcttccttaggtttcaattctcaatctttcaaatccacatttttagatttctattttgaatttaaataccagtttggatttagagttcaatttcaaaatacacaaccaaaataccagcatgaatgcaaatatattttatgtttatgtatttacttttcttttatactttgctcaaaatagttattttcatgtatgaaactcaataagcaaggaactcacgttattatataacctaataggaataatttaggtaacataatttatcatcctcttgatttaaaagagatatgcctccagaataagacacatactaaaaataactctaatattgaataactaaagtcgtacaaatctctactattattcctataaaataataaagaactagctacaacttctttaaggcattattcagggtttacagcttgagaggcatgaacccatcctgtatactcctggacttggaagacaaaatgtcaaccaaagtgaaaggttttcttatggttgctgctaagagatagattgaacactagatctctcctaagacgtcagggcatgcgtttagactcctacacatgcgaaaactgcatcttacagttggaagaaactatatctcaccacttcctgcggtgtaactttgcccaaagatgttggctcactgttggaatcactccgccccgaactttggatctaacgcttgcagtgctacatattagagcaagactaacaatgccgtggagaatggaaggtattataaccatgtcatggtgcatatggaaatgtcgaaataactggatattcgaaaacataccgccaacggtggcggcctgcaaggaaatgttcaagactgaaatgaactacatctgctaccaagttaagctcgagacaggagctaaaagtagaaactggatacaacactttgtaacatagtgacactccccttttcctttcttttaccttagaactatacatacaatccacattcaataaaaatttgtaggtacgccatacacactaccggaatccggctctttgccgagtgtgaggcgctttgtcgagtgctttttgtccagcactcggcaaaaaagtctttgccatgtgccgcactcggcaaagtcctgctctcggtaacgaccgcgtttaccgagagcaggactctcgacacagaaatacactcgacaaagaaatctttgccgagagccaaacactcggcgaacggcagcgctcggcaaagggtcgtcagccgccgtctaaagctgacggtcgttatctttgtcgagtgccccctcgtccgacactcagtagagcaagcttgccgagtgccatccttggacactcgataaagtatattttatttttttttattttgccaaccaaactttttgtggtatgttcctacactatgtagatctacatgtaccattttggcacaattacaaaaatgttttctataactattagatttagttcgtttatttgaatttcttcggaaaattcacatatgaactgcaagtcactcgaaacatgaaaaaccgtgcatgcaaaataaatgatatgcatgttatctagcacaagttacgaccgaattcagaagcagaccagaatcttcaagcaccatgctcactaaacatgaccgtgaacttgttatccagttgtttaaaaattgtataaaacacaaataaagtcagaaattaatgaaacttgtccacatgtcatgatatcatatatagaggttgtgataaaaatttgataatgtttcggtaaagttgtgacgtactatgtgtagaaacctaagtgacctacacataaaatcatagagtttcaatgtagttcactcgacaaagactttgtcaagtgtccgataaaaagtattcagcaaagaagccgttgtcgatttactgttcgtcgagatctctttgccgagtgtcacactaggcaaagtctttacggagtgtttttcaggctttgacactcggcaaagcgctcgattccagtagtgacagtaatttgcatcaaaaatagccgagagatttaaaatgagtcaactaatagaccaactaattattagctattagtcgttagcttctttaatctaagctaaaaccaactaatagcttatttgttgaattacaattagctcaacggaattctctgttttttctataaaaaaaagggaaactgcccctcatttacagcaaactgtccgctgcctgtcgtccagatacaatgaacgtacctagtaggaactcttttacacgctcggtcgctcgccgcggatcggagtcccaggaacacgacaccactgtggaacacgacaaagtctgctcagaggcggccacaccctggcgtgcaccgagccggagcccggataagcacggtaaggagagtacggcgggacgtggcgacccgtgtgtctgctgccacgcagccttcctccacgtagccgcgcggccgcgccacgtaccagggcccggcgctggtataaatgcgcgccacctccgctttagttctgcatacagccaacccaacacacacccgagcatatcacagtgacagacactacacgggatcctaaaccatgagggtgttgctcgttgccctcgctctcctggctctcgctgcgagcgccaccagcgccgggatgactgatctgctgatgctgaccgacaagtcgcagctgcaggcgctagcgatgctgctgcggaacaacgaggagctcatgatgagccaagcgatcaagtcggagacggagcgcgttgagtacctcaagacggtgagcgactgctacacgcggacaatgaagctccttgacgactccatggcggccaggatcacgtacgagcgttcgggcggaacgaggagcctcgtcgcgcgggacatggacgactacgtcgtctacggcctcaacgcgtgcttgcagaacgtccgcaactgctgcgtgcgtctggacgccatcgacaagctgcgggcgcactacgacgccctcgccgacgccgtcgccgaaccggccgccaacgtcgagggcctcgccgcggaggcgtccgagtacaaggccgccatgtggcagtactgctacaaccagcggagcgcctccgcgcgggcgcactcccgcgcctactcccaggcgctcaagctggagggcatcgacttcgccgagcttgtgcggaggcaccagctccggctcgggtacggcagcaagggcgaggagttcgaggacctggacgacacccagaagctggaggtgtacaacagcatcatcgtcgagtcggggcgggcggggctaccggtgcggatgttctcgtcgggccgctctgccggtggccctaagattgcagccacgacgtgggcgcaggcggtgagcgtcttcatcatggcggcgggcaacctggcgtgggacgtgttcaccacggagcacgaggtggaggccatcctcaagggcagcctcaacctcctggcggggctagggggcttcgccgtggaggccgtcgtcggcgcggctgtcaccaaggcggtcgcaaacgtcggcgccggcgtctttgcttgctctctcgcgggcttcgtcgtgggcgccatagccgggctgatcttcatcggcgtcagcggcctcctcattaacctcatcatcggctccccgaggaaggtgcctgacatgagcaagctcatgttccacaccgccgtcatgcccgatggaatggcccttgcgtatgcggtatctcatagcgagaaggacgagctgtaacctaggggccgccgcgctcgccaaaacgagcaagaagcaacaagagggtggcgcgcgaccgacgtgcgtacgtagcatgagcctgagtggagacgttggacgtgtatgtatatacctctctgcgtgttaactatgtacgtaagcggcaggcagtgcaataagtgtggctctgtagtatgtacgtgcggatacgatgctgtatgctactgaggcaagtcccataaataaataatgacacgtgcgtgttctataatctcttcgcttcttcagtgtccccttgcggagtttggcatccattgatgccgttacactgagaacataacggacacagtagacgaaccacttgagttcttgtatgaaattctgacccttttttttgaaggatcaggagggggaaacccctactggcctggtccttttacaatcaataaaaagaaaagaaaaagaaagaaaaaggaagagctatttctatatttgccacaaatttagccagttcgggattgaggtgtcgaattctccccgtgctctgtgaatgattagtcgcaattctctactaaattcctgagtacagcggagcacggagggatctctgtttgaaaacaaccactcgtttcggcttttccagatgctccaagtcataagaatagtgatctccatagagaagggaacgttgagctggtgtttgaggttcacagatgcctcttcagggttggaaattctgggtggggtaatgccaattgagttccagcaggctttcgcgaagttgcatctgaggaaaagatgataaagggtctcctctctttgccaaaggcagttttcgcaagagtaggaatctagctccatgtttctccttctcaacatatttctggtgtttagcctgttcttaagccacagccaatagaagactctatgcttaggctgacacttacttttccaaactagtttgtagataggatgagtttgcatctggcccatgaaagatctgtaagctttttgggacgacccggggaat

SEQ ID NO: 139 - DNA, 5192 bp, Artificial Sequence
  Synthetic construct, pAG4905
cggtatgaatttggaaacaaattcagtacttttaaaaaaatttgttgtagggagcaaataatacataaaataatttatgcattattttattttttatttgtaataatatgcttgaaacgataattcagtatgcatgttgtgccagtgtactacacgggcggggggaggggattgagtgggccagcgcggtgcgtagggtagatgggctgaaattgataactcaagtccgactaggttctctttttatttcccttccttttctattttcctttcttttaattttcatgctttcaaactaaattcaaattcgagttttgaatttcagcttctaaattgtacactaaaattatatgataaggtaacccctactattacttttaatttttttattctaccccatattgtttacttaggggagaataattgacttaatcacattcttccttaggtttcaattctcaatctttcaaatccacatttttagatttctattttgaatttaaataccagtttggatttagagttcaatttcaaaatacacaaccaaaataccagcatgaatgcaaatatattttatgtttatgtatttacttttcttttatactttgctcaaaatagttattttcatgtatgaaactcaataagcaaggaactcacgttattatataacctaataggaataatttaggtaacataatttatcatcctcttgatttaaaagagatatgcctccagaataagacacatactaaaaataactctaatattgaataactaaagtcgtacaaatctctactattattcctataaaataataaagaactagctacaacttctttaaggcattattcagggtttacagcttgagaggcatgaacccatcctgtatactcctggacttggaagacaaaatgtcaaccaaagtgaaaggttttcttatggttgctgctaagagatagattgaacactagatctctcctaagacgtcagggcatgcgtttagactcctacacatgcgaaaactgcatcttacagttggaagaaactatatctcaccacttcctgcggtgtaactttgcccaaagatgttggctcactgttggaatcactccgccccgaactttggatctaacgcttgcagtgctacatattagagcaagactaacaatgccgtggagaatggaaggtattataaccatgtcatggtgcatatggaaatgtcgaaataactggatattcgaaaacataccgccaacggtggcggcctgcaaggaaatgttcaagactgaaatgaactacatctgctaccaagttaagctcgagacaggagctaaaagtagaaactggatacaacactttgtaacatagtgacactccccttttcctttcttttaccttagaactatacatacaatccacattcaataaaaatttgtaggtacgccatacacactaccggaatccggctctttgccgagtgtgaggcgctttgtcgagtgctttttgtccagcactcggcaaaaaagtctttgccatgtgccgcactcggcaaagtcctgctctcggtaacgaccgcgtttaccgagagcaggactctcgacacagaaatacactcgacaaagaaatctttgccgagagccaaacactcggcgaacggcagcgctcggcaaagggtcgtcagccgccgtctaaagctgacggtcgttatctttgtcgagtgccccctcgtccgacactcagtagagcaagcttgccgagtgccatccttggacactcgataaagtatattttatttttttttattttgccaaccaaactttttgtggtatgttcctacactatgtagatctacatgtaccattttggcacaattacaaaaatgttttctataactattagatttagttcgtttatttgaatttcttcggaaaattcacatatgaactgcaagtcactcgaaacatgaaaaaccgtgcatgcaaaataaatgatatgcatgttatctagcacaagttacgaccgaattcagaagcagaccagaatcttcaagcaccatgctcactaaacatgaccgtgaacttgttatccagttgtttaaaaattgtataaaacacaaataaagtcagaaattaatgaaacttgtccacatgtcatgatatcatatatagaggttgtgataaaaatttgataatgtttcggtaaagttgtgacgtactatgtgtagaaacctaagtgacctacacataaaatcatagagtttcaatgtagttcactcgacaaagactttgtcaagtgtccgataaaaagtattcagcaaagaagccgttgtcgatttactgttcgtcgagatctctttgccgagtgtcacactaggcaaagtctttacggagtgtttttcaggctttgacactcggcaaagcgctcgattccagtagtgacagtaatttgcatcaaaaatagccgagagatttaaaatgagtcaactaatagaccaactaattattagctattagtcgttagcttctttaatctaagctaaaaccaactaatagcttatttgttgaattacaattagctcaacggaattctctgttttttctataaaaaaaagggaaactgcccctcatttacagcaaactgtccgctgcctgtcgtccagatacaatgaacgtacctagtaggaactcttttacacgctcggtcgctcgccgcggatcggagtcccaggaacacgacaccactgtggaacacgacaaagtctgctcagaggcggccacaccctggcgtgcaccgagccggagcccggataagcacggtaaggagagtacggcgggacgtggcgacccgtgtgtctgctgccacgcagccttcctccacgtagccgcgcggccgcgccacgtaccagggcccggcgctggtataaatgcgcgccacctccgctttagttctgcatacagccaacccaacacacacccgagcatatcacagtgacagacactacacgggatcctaaaccatgagggtgttgctcgttgccctcgctctcctggctctcgctgcgagcgccaccagcgccgggatgactgatctgctgatgctgaccgacaagtcgcagctgcaggcgctggcgatgctgctgcggaacaacgaggagctcatgatgagccaggcgatcaagtcggagacggagcgcattgagtacctcaagacggtgagcgactgctacacgcggacgatgaagctcctcgacgattccatggcggccaggaccacgtacgagcgttcgggcggaacgaggagcctcgtcgcgcgggacatggacgactacgtcgtctacggcctcaacgcgtgcttgcagaacgtccgcaactgctgcgtgcgcctggacgccatcgacaagctgcgggcgcactacgacgccctcgccgacgccgtcgccgacccggccgccaacgtcgagggcctcgccgcggaggcgtccgagtacaaggccgccatgtggcagtactgctacaaccagcggagcgcctccgcgcgggcgcactcccgcgcctactcccaggcgctcaagctggagggcatcgacttcgccgagctggtgcggaggcaccagctccggctcgggtacggcagcaagggcgaggagttcgaggacctggacgacacccagaagctggaggtgtacaaacagcatcatcgtcgagtcggggcggggcgggggctaccggtgcggatgttctcgtcgggccgctctgccggtggccctaagattgcagccacgacgtgggcggaggcggtgagcgtcttcatcatggcggcgggcaacctggcgtgggacgtgttcaccacggagcacgaggtggaggccatcctcaagggcagcctcaacctcctggcggggctagggggcttcgccgtggaggccgtcgtcggcgcggctgtcaccaaggcggtcgcaaacgtcggcgccggcgtctttgcttgctctctcgccggcttcgtcgtgggcgccatcgccgggctgatcttcgtcggcgtcagcggcctcctcattaacctcatcatcggctccccaaggaaggtgcctgacatgagcaagctcatgttccacaccgccgtcatgcccgatggaatggcccttgcgtatgcggtatctcatagcgagaaggacgagctgtaacctaggggccgccgcgctcgccaaaacgagcaagaagcaacaagagggtggcgcgcgaccgacgtgcgtacgtagcatgagcctgagtggagacgttggacgtgtatgtatatacctctctgcgtgttaactatgtacgtaagcggcaggcagtgcaataagtgtggctctgtagtatgtacgtgcggatacgatgctgtatgctactgaggcaagtcccataaataaataatgacacgtgcgtgttctataatctcttcgcttcttcagtgtccccttgcggagtttggcatccattgatgccgttacactgagaacataacggacacagtagacgaaccacttgagttcttgtatgaaattctgacccttttttttgaaggatcaggagggggaaacccctactggcctggtccttttacaatcaataaaaagaaaagaaaaagaaagaaaaaggaagagctatttctatatttgccacaaatttagccagttcgggattgaggtgtcgaattctccccgtgctctgtgaatgattagtcgcaattctctactaaattcctgagtacagcggagcacggagggatctctgtttgaaaacaaccactcgtttcggcttttccagatgctccaagtcataagaatagtgatctccatagagaagggaacgttgagctggtgtttgaggttcacagatgcctcttcagggttggaaattctgggtggggtaatgccaattgagttccagcaggctttcgcgaagttgcatctgaggaaaagatgataaagggtctcctctctttgccaaaggcagttttcgcaagagtaggaatctagctccatgtttctccttctcaacatatttctggtgtttagcctgttcttaagccacagccaatagaagactctatgcttaggctgacacttacttttccaaactagtttgtagataggatgagtttgcatctggcccatgaaagatctgtaagctttttgggacgacccggggaat

SEQ ID NO: 140 - DNA, 5684 bp, Artificial Sequence
  Synthetic construct, pAG4906
cggtatgaatttggaaacaaattcagtacttttaaaaaaatttgttgtagggagcaaataatacataaaataatttatgcattattttattttttatttgtaataatatgcttgaaacgataattcagtatgcatgttgtgccagtgtactacacgggcggggggaggggattgagtgggccagcgcggtgcgtagggtagatgggctgaaattgataactcaagtccgactaggttctctttttatttcccttccttttctattttcctttcttttaattttcatgctttcaaactaaattcaaattcgagttttgaatttcagcttctaaattgtacactaaaattatatgataaggtaacccctactattacttttaatttttttattctaccccatattgtttacttaggggagaataattgacttaatcacattcttccttaggtttcaattctcaatctttcaaatccacatttttagatttctattttgaatttaaataccagtttggatttagagttcaatttcaaaatacacaaccaaaataccagcatgaatgcaaatatattttatgtttatgtatttacttttcttttatactttgctcaaaatagttattttcatgtatgaaactcaataagcaaggaactcacgttattatataacctaataggaataatttaggtaacataatttatcatcctcttgatttaaaagagatatgcctccagaataagacacatactaaaaataactctaatattgaataactaaagtcgtacaaatctctactattattcctataaaataataaagaactagctacaacttctttaaggcattattcagggtttacagcttgagaggcatgaacccatcctgtatactcctggacttggaagacaaaatgtcaaccaaagtgaaaggttttcttatggttgctgctaagagatagattgaacactagatctctcctaagacgtcagggcatgcgtttagactcctacacatgcgaaaactgcatcttacagttggaagaaactatatctcaccacttcctgcggtgtaactttgcccaaagatgttggctcactgttggaatcactccgccccgaactttggatctaacgcttgcagtgctacatattagagcaagactaacaatgccgtggagaatggaaggtattataaccatgtcatggtgcatatggaaatgtcgaaataactggatattcgaaaacataccgccaacggtggcggcctgcaaggaaatgttcaagactgaaatgaactacatctgctaccaagttaagctcgagacaggagctaaaagtagaaactggatacaacactttgtaacatagtgacactccccttttcctttcttttaccttagaactatacatacaatccacattcaataaaaatttgtaggtacgccatacacactaccggaatccggctctttgccgagtgtgaggcgctttgtcgagtgctttttgtccagcactcggcaaaaaagtctttgccatgtgccgcactcggcaaagtcctgctctcggtaacgaccgcgtttaccgagagcaggactctcgacacagaaatacactcgacaaagaaatctttgccgagagccaaacactcggcgaacggcagcgctcggcaaagggtcgtcagccgccgtctaaagctgacggtcgttatctttgtcgagtgccccctcgtccgacactcagtagagcaagcttgccgagtgccatccttggacactcgataaagtatattttatttttttttattttgccaaccaaactttttgtggtatgttcctacactatgtagatctacatgtaccattttggcacaattacaaaaatgttttctataactattagatttagttcgtttatttgaatttcttcggaaaattcacatatgaactgcaagtcactcgaaacatgaaaaaccgtgcatgcaaaataaatgatatgcatgttatctagcacaagttacgaccgaattcagaagcagaccagaatcttcaagcaccatgctcactaaacatgaccgtgaacttgttatccagttgtttaaaaattgtataaaacacaaataaagtcagaaattaatgaaacttgtccacatgtcatgatatcatatatagaggttgtgataaaaatttgataatgtttcggtaaagttgtgacgtactatgtgtagaaacctaagtgacctacacataaaatcatagagtttcaatgtagttcactcgacaaagactttgtcaagtgtccgataaaaagtattcagcaaagaagccgttgtcgatttactgttcgtcgagatctctttgccgagtgtcacactaggcaaagtctttacggagtgtttttcaggctttgacactcggcaaagcgctcgattccagtagtgacagtaatttgcatcaaaaatagccgagagatttaaaatgagtcaactaatagaccaactaattattagctattagtcgttagcttctttaatctaagctaaaaccaactaatagcttatttgttgaattacaattagctcaacggaattctctgttttttctataaaaaaaagggaaactgcccctcatttacagcaaactgtccgctgcctgtcgtccagatacaatgaacgtacctagtaggaactcttttacacgctcggtcgctcgccgcggatcggagtcccaggaacacgacaccactgtggaacacgacaaagtctgctcagaggcggccacaccctggcgtgcaccgagccggagcccggataagcacggtaaggagagtacggcgggacgtggcgacccgtgtgtctgctgccacgcagccttcctccacgtagccgcgcggccgcgccacgtaccagggcccggcgctggtataaatgcgcgccacctccgctttagttctgcatacagccaacccaacacacacccgagcatatcacagtgacagacactacacgggatcctaaaccatgagggtgttgctcgttgccctcgctctcctggctctcgctgcgagcgccaccagcaccgcggttcccgccgagccggcgtcgacgctgtccgggccgtcgcggccggtgacggtggcgatcggagacaggggccacgcggtggacctgccggacacggacccgcgggtgcagcgccgcgtcacgggctgggcgcccgagcagatcgccgtcgcgctctccgcctcgcccacctccgcctgggtctcctggatcacaggggactaccagatgggcggcgccgtggagccgctggaccccggcgcggtgggcagcgtcgtgcggtacggcctcgccgccgacgccctcgaccacgaggccaccggggagtcgctcgtgtacagccagctgtacccgttcgagggcctccagaactacacctccggcatcatccaccacgtccgcctccagggcctggagcctgggaccaggtacttgtaccggtgcggcgacccggccatcccggacgccatgagcgacgtgcacgcgttccgcacgatgccggccgtcgggccggggagctacccagggcggatcgccgtggtcggggacctcgggctcacctacaacaccacctcgacggtggaccacttggtgcgcaaccgccccgacctggtgctcctcctcggcgacgtctgctacgccaacctgtacctgaccaacggcaccggggcggactgctactcctgcgccttcgccaagtccacgcccatccacgagacgtaccagccgcgctgggattactggggaaggtacatggagcccgtgacgtcgagcatcccgatgatggtggtggagggcaaccatgagatcgagcagcagatccacaacaggacgttcgcggcctacagctcgcggttcgcgttcccgtcggaggagagcgggtcctcctcgccgttctactactcgttcgacgccggcggcatccacttcgtcatgcttgcgtcctacgccgactacagcagatcaggtgcgcagtacaagtggctggaggcggacctggagaaggtggacaggtcggtgacgccatggctgatcgcgggctggcacgcgccctggtacaccacctacaaggctcactacagggaagccgagtgcatgagggtggagatggaggagctcctctacgcctacggtgtcgacgtcgtcttcaccggccacgtgcacgcgtacgagcggtcgaaccgggtgttcaactacacgctggacgcgtgcggccccgtgcacatctcggtgggcgacggcggcaaccgcgagaagatggcgacggcgcacgcggacgaggcgggccactgcccggacccggcgtcgacgccggaccccttcatggggggccgcctctgcgccgccaacttcacgtcgggccccgccgcgggccgcttctgctgggaccgccagccggagtacagcgcgtacagggagagcagcttcgggcacggcgtcctggaggtcaggaacgacacgcacgcgctctggcggtggcaccgcaaccaggacctccatgccgccgccgccgccaacgtcgccgccgacgaggtctacatcgtcagggagcccgacaagtgcctcgccaagacggccagattgttggcctatagcgagaaggacgagctgtgacctaggggccgccgcgctcgccaaaacgagcaagaagcaacaagagggtggcgcgcgaccgacgtgcgtacgtagcatgagcctgagtggagacgttggacgtgtatgtatatacctctctgcgtgttaactatgtacgtaagcggcaggcagtgcaataagtgtggctctgtagtatgtacgtgcggatacgatgctgtatgctactgaggcaagtcccataaataaataatgacacgtgcgtgttctataatctcttcgcttcttcagtgtccccttgcggagtttggcatccattgatgccgttacactgagaacataacggacacagtagacgaaccacttgagttcttgtatgaaattctgacccttttttttgaaggatcaggagggggaaacccctactggcctggtccttttacaatcaataaaaagaaaagaaaaagaaagaaaaaggaagagctatttctatatttgccacaaatttagccagttcgggattgaggtgtcgaattctccccgtgctctgtgaatgattagtcgcaattctctactaaattcctgagtacagcggagcacggagggatctctgtttgaaaacaaccactcgtttcggcttttccagatgctccaagtcataagaatagtgatctccatagagaagggaacgttgagctggtgtttgaggttcacagatgcctcttcagggttggaaattctgggtggggtaatgccaattgagttccagcaggctttcgcgaagttgcatctgaggaaaagatgataaagggtctcctctctttgccaaaggcagttttcgcaagagtaggaatctagctccatgtttctccttctcaacatatttctggtgtttagcctgttcttaagccacagccaatagaagactctatgcttaggctgacacttacttttccaaactagtttgtagataggatgagtttgcatctggcccatgaaagatctgtaagctttttgggacgacccggggaat

SEQ ID NO: 141 - DNA, 5669 bp, Artificial Sequence
  Synthetic construct, pAG4907
cggtatgaatttggaaacaaattcagtacttttaaaaaaatttgttgtagggagcaaataatacataaaataatttatgcattattttattttttatttgtaataatatgcttgaaacgataattcagtatgcatgttgtgccagtgtactacacgggcggggggaggggattgagtgggccagcgcggtgcgtagggtagatgggctgaaattgataactcaagtccgactaggttctctttttatttcccttccttttctattttcctttcttttaattttcatgctttcaaactaaattcaaattcgagttttgaatttcagcttctaaattgtacactaaaattatatgataaggtaacccctactattacttttaatttttttattctaccccatattgtttacttaggggagaataattgacttaatcacattcttccttaggtttcaattctcaatctttcaaatccacatttttagatttctattttgaatttaaataccagtttggatttagagttcaatttcaaaatacacaaccaaaataccagcatgaatgcaaatatattttatgtttatgtatttacttttcttttatactttgctcaaaatagttattttcatgtatgaaactcaataagcaaggaactcacgttattatataacctaataggaataatttaggtaacataatttatcatcctcttgatttaaaagagatatgcctccagaataagacacatactaaaaataactctaatattgaataactaaagtcgtacaaatctctactattattcctataaaataataaagaactagctacaacttctttaaggcattattcagggtttacagcttgagaggcatgaacccatcctgtatactcctggacttggaagacaaaatgtcaaccaaagtgaaaggttttcttatggttgctgctaagagatagattgaacactagatctctcctaagacgtcagggcatgcgtttagactcctacacatgcgaaaactgcatcttacagttggaagaaactatatctcaccacttcctgcggtgtaactttgcccaaagatgttggctcactgttggaatcactccgccccgaactttggatctaacgcttgcagtgctacatattagagcaagactaacaatgccgtggagaatggaaggtattataaccatgtcatggtgcatatggaaatgtcgaaataactggatattcgaaaacataccgccaacggtggcggcctgcaaggaaatgttcaagactgaaatgaactacatctgctaccaagttaagctcgagacaggagctaaaagtagaaactggatacaacactttgtaacatagtgacactccccttttcctttcttttaccttagaactatacatacaatccacattcaataaaaatttgtaggtacgccatacacactaccggaatccggctctttgccgagtgtgaggcgctttgtcgagtgctttttgtccagcactcggcaaaaaagtctttgccatgtgccgcactcggcaaagtcctgctctcggtaacgaccgcgtttaccgagagcaggactctcgacacagaaatacactcgacaaagaaatctttgccgagagccaaacactcggcgaacggcagcgctcggcaaagggtcgtcagccgccgtctaaagctgacggtcgttatctttgtcgagtgccccctcgtccgacactcagtagagcaagcttgccgagtgccatccttggacactcgataaagtatattttatttttttttattttgccaaccaaactttttgtggtatgttcctacactatgtagatctacatgtaccattttggcacaattacaaaaatgttttctataactattagatttagttcgtttatttgaatttcttcggaaaattcacatatgaactgcaagtcactcgaaacatgaaaaaccgtgcatgcaaaataaatgatatgcatgttatctagcacaagttacgaccgaattcagaagcagaccagaatcttcaagcaccatgctcactaaacatgaccgtgaacttgttatccagttgtttaaaaattgtataaaacacaaataaagtcagaaattaatgaaacttgtccacatgtcatgatatcatatatagaggttgtgataaaaatttgataatgtttcggtaaagttgtgacgtactatgtgtagaaacctaagtgacctacacataaaatcatagagtttcaatgtagttcactcgacaaagactttgtcaagtgtccgataaaaagtattcagcaaagaagccgttgtcgatttactgttcgtcgagatctctttgccgagtgtcacactaggcaaagtctttacggagtgtttttcaggctttgacactcggcaaagcgctcgattccagtagtgacagtaatttgcatcaaaaatagccgagagatttaaaatgagtcaactaatagaccaactaattattagctattagtcgttagcttctttaatctaagctaaaaccaactaatagcttatttgttgaattacaattagctcaacggaattctctgttttttctataaaaaaaagggaaactgcccctcatttacagcaaactgtccgctgcctgtcgtccagatacaatgaacgtacctagtaggaactcttttacacgctcggtcgctcgccgcggatcggagtcccaggaacacgacaccactgtggaacacgacaaagtctgctcagaggcggccacaccctggcgtgcaccgagccggagcccggataagcacggtaaggagagtacggcgggacgtggcgacccgtgtgtctgctgccacgcagccttcctccacgtagccgcgcggccgcgccacgtaccagggcccggcgctggtataaatgcgcgccacctccgctttagttctgcatacagccaacccaacacacacccgagcatatcacagtgacagacactacacgggatcctaaaccatgagggtgttgctcgttgccctcgctctcctggctctcgctgcgagcgccaccagcgagccggcgtcgacgctgtccgggccgtcgcggccggtgacggtggcgatcggagacaggggccacgcggtggacctgccggacacggacccgcgggtgcagcgccgcgtcacgggctgggcgcccgagcagatcgccgtcgcgctctccgcctcgcccacctccgcctgggtctcctggatcacaggggactaccagatgggcggcgccgtggagccgctggaccccggcgcggtgggcagcgtcgtgcggtacggcctcgccgccgacgccctcgaccacgaggccaccggggagtcgctcgtgtacagccagctgtacccgttcgagggcctccagaactacacctccggcatcatccaccacgtccgcctccagggcctggagcctgggaccaggtacttgtaccggtgcggcgacccggccatcccggacgccatgagcgacgtgcacgcgttccgcacgatgccggccgtcgggccggggagctacccggggcggatcgccgtggtcggggacctcgggctcacctacaacaccacctcgacggtggaccacttggtgcgcaaccgccccgacctggtgctcctcctcggcgacgtctgctacgccaacctgtacctgaccaacggcaccggggcggactgctactcctgcgccttcgccaagtccacgcccatccacgagacgtaccagccgcgctgggattactggggaaggtacatggagcccgtgacgtcgagcatcccgatgatggtggtggagggcaaccatgagatcgagcagcagatccacaacaggacgttcgcggcctacagctcgcggttcgcgttcccgtcggaggagagcgggtcctcctcgccgttctactactcgttcgacgccggcggcatccacttcgtcatgcttgcgtcctacgccgactacagcagatcaggtgcgcagtacaagtggctggaggcggacctggagaaggtggacaggtcggtgacgccatggctgatcgcgggctggcacgcgccctggtacaccacctacaaggctcactacagggaagccgagtgcatgagggtggagatggaggagctcctctacgcctacggtgtcgacgtcgtcttcaccggccacgtgcacgcgtacgagcggtcgaaccgggtgttcaactacacgctggacgcgtgcggccccgtgcacatctcggtgggcgacggcggcaaccgcgagaagatggcgacggcgcacgcggacgaggccggccactgcccggacccggcgtcgacgccggaccccttcatggggggccgcctctgcgccgccaacttcacgtcgggccccgccgcgggccgcttctgctgggaccgccagccggagtacagcgcgtacagggagagcagcttcgggcacggcgtcctggaggtcaggaacgacacgcacgcgctctggcggtggcaccgcaaccaggacctccatgccgccgccgccgccaacgtcgccgccgacgaggtctacatcgtcagggagcccgacaagtgcctcgccaagacggccagattgttggcctatagcgagaaggacgagctgtgacctaggggccgccgcgctcgccaaaacgagcaagaagcaacaagagggtggcgcgcgaccgacgtgcgtacgtagcatgagcctgagtggagacgttggacgtgtatgtatatacctctctgcgtgttaactatgtacgtaagcggcaggcagtgcaataagtgtggctctgtagtatgtacgtgcggatacgatgctgtatgctactgaggcaagtcccataaataaataatgacacgtgcgtgttctataatctcttcgcttcttcagtgtccccttgcggagtttggcatccattgatgccgttacactgagaacataacggacacagtagacgaaccacttgagttcttgtatgaaattctgacccttttttttgaaggatcaggagggggaaacccctactggcctggtccttttacaatcaataaaaagaaaagaaaaagaaagaaaaaggaagagctatttctatatttgccacaaatttagccagttcgggattgaggtgtcgaattctccccgtgctctgtgaatgattagtcgcaattctctactaaattcctgagtacagcggagcacggagggatctctgtttgaaaacaaccactcgtttcggcttttccagatgctccaagtcataagaatagtgatctccatagagaagggaacgttgagctggtgtttgaggttcacagatgcctcttcagggttggaaattctgggtggggtaatgccaattgagttccagcaggctttcgcgaagttgcatctgaggaaaagatgataaagggtctcctctctttgccaaaggcagttttcgcaagagtaggaatctagctccatgtttctccttctcaacatatttctggtgtttagcctgttcttaagccacagccaatagaagactctatgcttaggctgacacttacttttccaaactagtttgtagataggatgagtttgcatctggcccatgaaagatctgtaagctttttgggacgacccggggaat

SEQ ID NO: 142 - DNA, 4609 bp, Artificial Sequence
  Synthetic construct, pAG4260
cggtatgaatttggaaacaaattcagtacttttaaaaaaatttgttgtagggagcaaataatacataaaataatttatgcattattttattttttatttgtaataatatgcttgaaacgataattcagtatgcatgttgtgccagtgtactacacgggcggggggaggggattgagtgggccagcgcggtgcgtagggtagatgggctgaaattgataactcaagtccgactaggttctctttttatttcccttccttttctattttcctttcttttaattttcatgctttcaaactaaattcaaattcgagttttgaatttcagcttctaaattgtacactaaaattatatgataaggtaacccctactattacttttaatttttttattctaccccatattgtttacttaggggagaataattgacttaatcacattcttccttaggtttcaattctcaatctttcaaatccacatttttagatttctattttgaatttaaataccagtttggatttagagttcaatttcaaaatacacaaccaaaataccagcatgaatgcaaatatattttatgtttatgtatttacttttcttttatactttgctcaaaatagttattttcatgtatgaaactcaataagcaaggaactcacgttattatataacctaataggaataatttaggtaacataatttatcatcctcttgatttaaaagagatatgcctccagaataagacacatactaaaaataactctaatattgaataactaaagtcgtacaaatctctactattattcctataaaataataaagaactagctacaacttctttaaggcattattcagggtttacagcttgagaggcatgaacccatcctgtatactcctggacttggaagacaaaatgtcaaccaaagtgaaaggttttcttatggttgctgctaagagatagattgaacactagatctctcctaagacgtcagggcatgcgtttagactcctacacatgcgaaaactgcatcttacagttggaagaaactatatctcaccacttcctgcggtgtaactttgcccaaagatgttggctcactgttggaatcactccgccccgaactttggatctaacgcttgcagtgctacatattagagcaagactaacaatgccgtggagaatggaaggtattataaccatgtcatggtgcatatggaaatgtcgaaataactggatattcgaaaacataccgccaacggtggcggcctgcaaggaaatgttcaagactgaaatgaactacatctgctaccaagttaagctcgagacaggagctaaaagtagaaactggatacaacactttgtaacatagtgacactccccttttcctttcttttaccttagaactatacatacaatccacattcaataaaaatttgtaggtacgccatacacactaccggaatccggctctttgccgagtgtgaggcgctttgtcgagtgctttttgtccagcactcggcaaaaaagtctttgccatgtgccgcactcggcaaagtcctgctctcggtaacgaccgcgtttaccgagagcaggactctcgacacagaaatacactcgacaaagaaatctttgccgagagccaaacactcggcgaacggcagcgctcggcaaagggtcgtcagccgccgtctaaagctgacggtcgttatctttgtcgagtgccccctcgtccgacactcagtagagcaagcttgccgagtgccatccttggacactcgataaagtatattttatttttttttattttgccaaccaaactttttgtggtatgttcctacactatgtagatctacatgtaccattttggcacaattacaaaaatgttttctataactattagatttagttcgtttatttgaatttcttcggaaaattcacatatgaactgcaagtcactcgaaacatgaaaaaccgtgcatgcaaaataaatgatatgcatgttatctagcacaagttacgaccgaattcagaagcagaccagaatcttcaagcaccatgctcactaaacatgaccgtgaacttgttatccagttgtttaaaaattgtataaaacacaaataaagtcagaaattaatgaaacttgtccacatgtcatgatatcatatatagaggttgtgataaaaatttgataatgtttcggtaaagttgtgacgtactatgtgtagaaacctaagtgacctacacataaaatcatagagtttcaatgtagttcactcgacaaagactttgtcaagtgtccgataaaaagtattcagcaaagaagccgttgtcgatttactgttcgtcgagatctctttgccgagtgtcacactaggcaaagtctttacggagtgtttttcaggctttgacactcggcaaagcgctcgattccagtagtgacagtaatttgcatcaaaaatagccgagagatttaaaatgagtcaactaatagaccaactaattattagctattagtcgttagcttctttaatctaagctaaaaccaactaatagcttatttgttgaattacaattagctcaacggaattctctgttttttctataaaaaaaagggaaactgcccctcatttacagcaaactgtccgctgcctgtcgtccagatacaatgaacgtacctagtaggaactcttttacacgctcggtcgctcgccgcggatcggagtcccaggaacacgacaccactgtggaacacgacaaagtctgctcagaggcggccacaccctggcgtgcaccgagccggagcccggataagcacggtaaggagagtacggcgggacgtggcgacccgtgtgtctgctgccacgcagccttcctccacgtagccgcgcggccgcgccacgtaccagggcccggcgctggtataaatgcgcgccacctccgctttagttctgcatacagccaacccaacacacacccgagcatatcacagtgacagacactacacgggatccaccatgagggtgttgctcgttgccctcgctctcctggctctcgctgcgagcgccaccagcgctgcgcagtccgagccggagctgaagctggagtccgtggtgatcgtgtcgcgccacggggtgcgcgccccgaccaaggccacgcagctcatgcaggacgtgaccccggacgcctggccgacctggccggtgaagctcggcgagctgaccccgcgcggcggcgagctgatcgcctacctcggccactactggcgccagcgcctcgtggccgacggcctcctcccgaagtgcggctgcccgcagtccggccaggtggcgatcatcgccgacgtggacgagcgcacccgcaagacgggcgaggccttcgccgccggcctcgccccggactgcgccatcaccgtgcacacccaggccgacacctcctccccggacccgctcttcaacccgctcaagaccggcgtgtgccagctcgacaacgccaacgtgaccgacgccatcctggagcgcgccggcggctccatcgccgacttcaccggccactaccagaccgccttccgcgagctggagcgcgtgctcaacttcccgcagtcgaacctctgcctcaagcgcgagaagcaggacgagtcctgctccctcacccaggccctcccgtccgagctgaaggtgtccgccgactgcgtgtccctcaccggcgccgtgtccctcgcctccatgctcaccgaaatcttcctcctccagcaggcccagggcatgccggagccgggctggggccgcatcaccgactcccaccagtggaacaccctcctctccctccacaacgcccagttcgacctcctccagcgcaccccggaggtggcccgctcccgcgccaccccgctcctcgacctcatcaagaccgccctcaccccgcacccgccgcagaagcaggcctacggcgtgaccctcccgacctcggtgctcttcatcgccggccacgacaccaacctcgccaacctcggcggcgccctggagctgaactggaccctcccgggccagccggacaacaccccgccgggcggcgagctggtgttcgagcgctggcgccgcctctccgacaactcccagtggattcaggtgtccctcgtgttccagaccctccagcagatgcgcgacaagaccccgctctccctcaacaccccgccgggcgaggtgaagctcaccctggccggctgcgaggagcgcaacgcgcagggcatgtgctccctcgccggcttcacccagatcgtgaacgaggcccgcatcccggcctgctccctctccgagaaggacgagctgtaacctaggtccccgaatttccccgatcgttcaaacatttggcaataaagtttcttaagattgaatcctgttgccggtcttgcgatgattatcatataatttctgttgaattacgttaagcatgtaataattaacatgtaatgcatgacgttatttatgagatgggtttttatgattagagtcccgcaattatacatttaatacgcgatagaaaacaaaatatagcgcgcaaactaggataaattatcgcgcgcggtgtcatctatgttactagatcgggaattg

SEQ ID NO: 143 - DNA, 4609 bp, Artificial Sequence
  Synthetic construct, pAG4264
cggtatgaatttggaaacaaattcagtacttttaaaaaaatttgttgtagggagcaaataatacataaaataatttatgcattattttattttttatttgtaataatatgcttgaaacgataattcagtatgcatgttgtgccagtgtactacacgggcggggggaggggattgagtgggccagcgcggtgcgtagggtagatgggctgaaattgataactcaagtccgactaggttctctttttatttcccttccttttctattttcctttcttttaattttcatgctttcaaactaaattcaaattcgagttttgaatttcagcttctaaattgtacactaaaattatatgataaggtaacccctactattacttttaatttttttattctaccccatattgtttacttaggggagaataattgacttaatcacattcttccttaggtttcaattctcaatctttcaaatccacatttttagatttctattttgaatttaaataccagtttggatttagagttcaatttcaaaatacacaaccaaaataccagcatgaatgcaaatatattttatgtttatgtatttacttttcttttatactttgctcaaaatagttattttcatgtatgaaactcaataagcaaggaactcacgttattatataacctaataggaataatttaggtaacataatttatcatcctcttgatttaaaagagatatgcctccagaataagacacatactaaaaataactctaatattgaataactaaagtcgtacaaatctctactattattcctataaaataataaagaactagctacaacttctttaaggcattattcagggtttacagcttgagaggcatgaacccatcctgtatactcctggacttggaagacaaaatgtcaaccaaagtgaaaggttttcttatggttgctgctaagagatagattgaacactagatctctcctaagacgtcagggcatgcgtttagactcctacacatgcgaaaactgcatcttacagttggaagaaactatatctcaccacttcctgcggtgtaactttgcccaaagatgttggctcactgttggaatcactccgccccgaactttggatctaacgcttgcagtgctacatattagagcaagactaacaatgccgtggagaatggaaggtattataaccatgtcatggtgcatatggaaatgtcgaaataactggatattcgaaaacataccgccaacggtggcggcctgcaaggaaatgttcaagactgaaatgaactacatctgctaccaagttaagctcgagacaggagctaaaagtagaaactggatacaacactttgtaacatagtgacactccccttttcctttcttttaccttagaactatacatacaatccacattcaataaaaatttgtaggtacgccatacacactaccggaatccggctctttgccgagtgtgaggcgctttgtcgagtgctttttgtccagcactcggcaaaaaagtctttgccatgtgccgcactcggcaaagtcctgctctcggtaacgaccgcgtttaccgagagcaggactctcgacacagaaatacactcgacaaagaaatctttgccgagagccaaacactcggcgaacggcagcgctcggcaaagggtcgtcagccgccgtctaaagctgacggtcgttatctttgtcgagtgccccctcgtccgacactcagtagagcaagcttgccgagtgccatccttggacactcgataaagtatattttatttttttttattttgccaaccaaactttttgtggtatgttcctacactatgtagatctacatgtaccattttggcacaattacaaaaatgttttctataactattagatttagttcgtttatttgaatttcttcggaaaattcacatatgaactgcaagtcactcgaaacatgaaaaaccgtgcatgcaaaataaatgatatgcatgttatctagcacaagttacgaccgaattcagaagcagaccagaatcttcaagcaccatgctcactaaacatgaccgtgaacttgttatccagttgtttaaaaattgtataaaacacaaataaagtcagaaattaatgaaacttgtccacatgtcatgatatcatatatagaggttgtgataaaaatttgataatgtttcggtaaagttgtgacgtactatgtgtagaaacctaagtgacctacacataaaatcatagagtttcaatgtagttcactcgacaaagactttgtcaagtgtccgataaaaagtattcagcaaagaagccgttgtcgatttactgttcgtcgagatctctttgccgagtgtcacactaggcaaagtctttacggagtgtttttcaggctttgacactcggcaaagcgctcgattccagtagtgacagtaatttgcatcaaaaatagccgagagatttaaaatgagtcaactaatagaccaactaattattagctattagtcgttagcttctttaatctaagctaaaaccaactaatagcttatttgttgaattacaattagctcaacggaattctctgttttttctataaaaaaaagggaaactgcccctcatttacagcaaactgtccgctgcctgtcgtccagatacaatgaacgtacctagtaggaactcttttacacgctcggtcgctcgccgcggatcggagtcccaggaacacgacaccactgtggaacacgacaaagtctgctcagaggcggccacaccctggcgtgcaccgagccggagcccggataagcacggtaaggagagtacggcgggacgtggcgacccgtgtgtctgctgccacgcagccttcctccacgtagccgcgcggccgcgccacgtaccagggcccggcgctggtataaatgcgcgccacctccgctttagttctgcatacagccaacccaacacacacccgagcatatcacagtgacagacactacacgggatcctaaaccatgcgcgtgctgctcgtggccctggccctgctggctcttgctgccagcgccacctctgcccagagcgagccggagctgaagctggagagcgtggtgatcgtgagcaggcacggcgtgagggccccgaccaagttcacccagctgatgcaggacgtgaccccggacgcgttctacacctggccggtgaagctgggcgagctgaccccgaggggcggcgagctgatcgcctacctgggccactactggaggcagaggctggtggccgacggcctgctgccgaagaagggctgcccgcagagcggccaggtggccatcatcgccgacgtggacgagaggaccaggaagaccggtgaggccttcgccgccggcctggccccggactgcgccatcaccgtgcacacccaggccgacaccagcagcccggacccgctgttcaacccgctgaagaccggcgtgtgccagctggacgtggcccaggtgaccgacgccatcctggagagggccggcggcagcatcgccgacttcaccggccactaccagaccgccttcagggagctggagagggtgctgaacttcccgcagagcaacctggccctgaagagggagaagcaggacgagagcgccagcctgacccaggccctgccgagcgagctgaaggtgagcgccgacaacgtgagcctgaccggcgcctggagcctggccagcatgctgaccgagattttcctgctgcagcaggcccagggcatgccggagccgggctggggcaggatcaccgacagccaccagtggaacaccctgctgagcctgcacaacgcccagttcgacctgctgcagaggaccccggaggtggccaggagcagggccaccccgctgctggacctgatcaagaccgccctgaccccgcacccgccgcagaagcaggcctacggcgtgaccctgccgaccagcgtgctgttcatcgccggccacgacaccaacctggccaacctgggcggcgccctcgagctgcagtggaccctgccgggccagccggacaacaccccgccgggcggcgagctggtgttcgagaggtggaggaggctgagcgacaacagccagtggattcaggtgagcctggtgttccagaccctgcagcagatgagggacaagaccccgctgttcctgaacaccccgccgggcgaggtgaagctgaccctggccggctgcgaggagaggaacgcccagggcatgtgcagcctggccggcttcacccagatcgtgaacgaggccaggattccggcctgcagcctgagcgagaaggacgagctgtgacctaggtccccgaatttccccgatcgttcaaacatttggcaataaagtttcttaagattgaatcctgttgccggtcttgcgatgattatcatataatttctgttgaattacgttaagcatgtaataattaacatgtaatgcatgacgttatttatgagatgggtttttatgattagagtcccgcaattatacatttaatacgcgatagaaaacaaaatatagcgcgcaaactaggataaattatcgcgcgcggtgtcatctatgttactagatcgggaattg

SEQ ID NO: 144 - DNA, 4609 bp, Artificial Sequence
  Synthetic construct, pAG4266
cggtatgaatttggaaacaaattcagtacttttaaaaaaatttgttgtagggagcaaataatacataaaataatttatgcattattttattttttatttgtaataatatgcttgaaacgataattcagtatgcatgttgtgccagtgtactacacgggcggggggaggggattgagtgggccagcgcggtgcgtagggtagatgggctgaaattgataactcaagtccgactaggttctctttttatttcccttccttttctattttcctttcttttaattttcatgctttcaaactaaattcaaattcgagttttgaatttcagcttctaaattgtacactaaaattatatgataaggtaacccctactattacttttaatttttttattctaccccatattgtttacttaggggagaataattgacttaatcacattcttccttaggtttcaattctcaatctttcaaatccacatttttagatttctattttgaatttaaataccagtttggatttagagttcaatttcaaaatacacaaccaaaataccagcatgaatgcaaatatattttatgtttatgtatttacttttcttttatactttgctcaaaatagttattttcatgtatgaaactcaataagcaaggaactcacgttattatataacctaataggaataatttaggtaacataatttatcatcctcttgatttaaaagagatatgcctccagaataagacacatactaaaaataactctaatattgaataactaaagtcgtacaaatctctactattattcctataaaataataaagaactagctacaacttctttaaggcattattcagggtttacagcttgagaggcatgaacccatcctgtatactcctggacttggaagacaaaatgtcaaccaaagtgaaaggttttcttatggttgctgctaagagatagattgaacactagatctctcctaagacgtcagggcatgcgtttagactcctacacatgcgaaaactgcatcttacagttggaagaaactatatctcaccacttcctgcggtgtaactttgcccaaagatgttggctcactgttggaatcactccgccccgaactttggatctaacgcttgcagtgctacatattagagcaagactaacaatgccgtggagaatggaaggtattataaccatgtcatggtgcatatggaaatgtcgaaataactggatattcgaaaacataccgccaacggtggcggcctgcaaggaaatgttcaagactgaaatgaactacatctgctaccaagttaagctcgagacaggagctaaaagtagaaactggatacaacactttgtaacatagtgacactccccttttcctttcttttaccttagaactatacatacaatccacattcaataaaaatttgtaggtacgccatacacactaccggaatccggctctttgccgagtgtgaggcgctttgtcgagtgctttttgtccagcactcggcaaaaaagtctttgccatgtgccgcactcggcaaagtcctgctctcggtaacgaccgcgtttaccgagagcaggactctcgacacagaaatacactcgacaaagaaatctttgccgagagccaaacactcggcgaacggcagcgctcggcaaagggtcgtcagccgccgtctaaagctgacggtcgttatctttgtcgagtgccccctcgtccgacactcagtagagcaagcttgccgagtgccatccttggacactcgataaagtatattttatttttttttattttgccaaccaaactttttgtggtatgttcctacactatgtagatctacatgtaccattttggcacaattacaaaaatgttttctataactattagatttagttcgtttatttgaatttcttcggaaaattcacatatgaactgcaagtcactcgaaacatgaaaaaccgtgcatgcaaaataaatgatatgcatgttatctagcacaagttacgaccgaattcagaagcagaccagaatcttcaagcaccatgctcactaaacatgaccgtgaacttgttatccagttgtttaaaaattgtataaaacacaaataaagtcagaaattaatgaaacttgtccacatgtcatgatatcatatatagaggttgtgataaaaatttgataatgtttcggtaaagttgtgacgtactatgtgtagaaacctaagtgacctacacataaaatcatagagtttcaatgtagttcactcgacaaagactttgtcaagtgtccgataaaaagtattcagcaaagaagccgttgtcgatttactgttcgtcgagatctctttgccgagtgtcacactaggcaaagtctttacggagtgtttttcaggctttgacactcggcaaagcgctcgattccagtagtgacagtaatttgcatcaaaaatagccgagagatttaaaatgagtcaactaatagaccaactaattattagctattagtcgttagcttctttaatctaagctaaaaccaactaatagcttatttgttgaattacaattagctcaacggaattctctgttttttctataaaaaaaagggaaactgcccctcatttacagcaaactgtccgctgcctgtcgtccagatacaatgaacgtacctagtaggaactcttttacacgctcggtcgctcgccgcggatcggagtcccaggaacacgacaccactgtggaacacgacaaagtctgctcagaggcggccacaccctggcgtgcaccgagccggagcccggataagcacggtaaggagagtacggcgggacgtggcgacccgtgtgtctgctgccacgcagccttcctccacgtagccgcgcggccgcgccacgtaccagggcccggcgctggtataaatgcgcgccacctccgctttagttctgcatacagccaacccaacacacacccgagcatatcacagtgacagacactacacgggatcctaaaccatgcgcgtgctgctcgtggccctggccctgctggctcttgctgccagcgccacctctgcccagagcgagccggagctgaagctggagagcgtggtgatcgtgagcaggcacggcgtgagggccccgaccaaggccacccagctgatgcaggacgtgaccccggacgcgttctacacctggccggtgaagctgggcgagctgaccccgaggggcggcgagctgatcgcctacctgggccactactggaggcagaggctggtggccgacggcctgctgccgaagaagggctgcccgcagagcggccaggtggccatcatcgccgacgtggacgagaggaccaggaagaccggcgaggccttcgccgccggcctggccccggactgcgccatcaccgtgcacacccaggccgacaccagcagcccggacccgctgttcaacccgctgaagaccggcgtgtgccagctggacaacgcccaggtgaccgacgccatcctggagagggccggcggcagcatcgccgacttcaccggccactaccagaccgccttcagggagctggagagggtgctgaacttcccgcagagcaacctgtgcctgaagagggagaagcaggacgagagctgcagcctgacccaggccctgccgagcgagctgaaggtgagcgccgacaacgtgagcctgaccggcgccgtgagcctggccagcatgctgaccgagattttcctgctgcagcaggcccagggcatgccggagccgggctggggcaggatcaccgacagccaccagtggaacaccctgctgagcctgcacaacgcccagttcgacctgctgcagaggaccccggaggtggccaggagcagggccaccccgctgctggacctgatcaagaccgccctgaccccgcacccgccgcagaagcaggcctacggcgtgaccctgccgaccagcgtgctgttcatcgccggccacgacaccaacctggccaacctgggcggcgccctcgagctgcagtggaccctgccgggccagccggacaacaccccgccgggcggcgagctggtgttcgagaggtggaggaggctgagcgacaacagccagtggattcaggtgagcctggtgttccagaccctgcagcagatgagggacaagaccccgctgtccctgaacaccccgccgggcgaggtgaagctgaccctggccggctgcgaggagaggaacgcccagggcatgtgcagcctggccggcttcacccagatcgtgaacgaggccaggattccggcctgcagcctgagcgagaaggacgagctgtgacctaggtccccgaatttccccgatcgttcaaacatttggcaataaagtttcttaagattgaatcctgttgccggtcttgcgatgattatcatataatttctgttgaattacgttaagcatgtaataattaacatgtaatgcatgacgttatttatgagatgggtttttatgattagagtcccgcaattatacatttaatacgcgatagaaaacaaaatatagcgcgcaaactaggataaattatcgcgcgcggtgtcatctatgttactagatcgggaattg

SEQ ID NO: 145 - DNA, 7583 bp, Artificial Sequence
  Synthetic construct, pAG4279
aaagtaatcatattattttatgtgtgaatcttctttactttttcatttgattatgattatgaaggtatgaccttcataaccttcgtccgaaatccattatatccaaaggaaaataatgcttcgaaggacgaaggattttgatatttaacattttatgttgccttgttcttaattcatagcatttgagaacaagtccccaacaccaatctttatctttactatattaaagcaccagttcaacgatcgtctcgtgtcaatattattaaaaaactcctacatttctttataatcaacccgcactcttataatctcttctcttactactataataagagagtttatgtacaaaataaggtgaaattatgtataagtgttctggaccttggttgttggctcatattcacacaacctaatcaatagaaaacatatgttttattaaaacaaaatttatcatatatatatatatatatatatatatatatatatatatatataatataaaccgtagcaatgcacaggcatatgactagtggcaacttaataccatgtgtgtattaagatgaataagaggtatccaaataaataacttgttcgcttacgtctggatcgaaaggggttggaaacgattaaatctcttcctagtcaaaattaaatagaaggagatttaatcgatttctcccaatccccttcgatccaggtgcaaccgaataagtccttaaatgttgaggaacacgaaacaaccatgcattggcatgtaaagctccaagaattcgttgtatccttaacaactcacagaacatcaaccaaaattgcacgtcaagggtattgggtaagaaacaatcaaacaaatcctctctgtgtgcaaagaaacacggtgagtcatgccgagatcatactcatctgatatacatgcttacagctcacaagacattacaaacaactcatattgcattacaaagatcgtttcatgaaaaataaaataggccggaacaggacaaaaatccttgacgtgtaaagtaaatttacaacaaaaaaaaagccatatgtcaagctaaatctaattcgttttacgtagatcaacaacctgtagaaggcaacaaaactgagccacgcagaagtacagaatgattccagatgaaccatcgacgtgctacgtaaagagagtgacgagtcatatacatttggcaagaaaccatgaagctgcctacagccgtctcggtggcataagaacacaagaaattgtgttaattaatcaaagctataaataacgctcgcatgcctgtgcacttctccatcaccaccactgggtcttcagaccattagctttatctactccagagcgcagaagaacccgatcgacaccggatcctaaaccatgcgcgtgctgctcgtggccctggccctgctggctcttgctgccagcgccacctctgcccagagcgagccggagctgaagctggagagcgtggtgatcgtgagcaggcacggcgtgagggccccgaccaagttcacccagctgatgcaggacgtgaccccggacgcgttctacacctggccggtgaagctgggcgagctgaccccgaggggcggcgagctgatcgcctacctgggccactactggaggcagaggctggtggccgacggcctgctgccgaagaagggctgcccgcagagcggccaggtggccatcatcgccgacgtggacgagaggaccaggaagaccggtgaggccttcgccgccggcctggccccggactgcgccatcaccgtgcacacccaggccgacaccagcagcccggacccgctgttcaacccgctgaagaccggcgtgtgccagctggacgtggcccaggtgaccgacgccatcctggagagggccggcggcagcatcgccgacttcaccggccactaccagaccgccttcagggagctggagagggtgctgaacttcccgcagagcaacctggccctgaagagggagaagcaggacgagagcgccagcctgacccaggccctgccgagcgagctgaaggtgagcgccgacaacgtgagcctgaccggcgcctggagcctggccagcatgctgaccgagattttcctgctgcagcaggcccagggcatgccggagccgggctggggcaggatcaccgacagccaccagtggaacaccctgctgagcctgcacaacgcccagttcgacctgctgcagaggaccccggaggtggccaggagcagggccaccccgctgctggacctgatcaagaccgccctgaccccgcacccgccgcagaagcaggcctacggcgtgaccctgccgaccagcgtgctgttcatcgccggccacgacaccaacctggccaacctgggcggcgccctcgagctgcagtggaccctgccgggccagccggacaacaccccgccgggcggcgagctggtgttcgagaggtggaggaggctgagcgacaacagccagtggattcaggtgagcctggtgttccagaccctgcagcagatgagggacaagaccccgctgttcctgaacaccccgccgggcgaggtgaagctgaccctggccggctgcgaggagaggaacgcccagggcatgtgcagcctggccggcttcacccagatcgtgaacgaggccaggattccggcctgcagcctgagcgagaaggacgagctgtgacctaggtccccgaatttccccgatcgttcaaacatttggcaataaagtttcttaagattgaatcctgttgccggtcttgcgatgattatcatataatttctgttgaattacgttaagcatgtaataattaacatgtaatgcatgacgttatttatgagatgggtttttatgattagagtcccgcaattatacatttaatacgcgatagaaaacaaaatatagcgcgcaaactaggataaattatcgcgcgcggtgtcatctatgttactagatcgggaattgggtacccggtatgaatttggaaacaaattcagtacttttaaaaaaatttgttgtagggagcaaataatacataaaataatttatgcattattttattttttatttgtaataatatgcttgaaacgataattcagtatgcatgttgtgccagtgtactacacgggcggggggaggggattgagtgggccagcgcggtgcgtagggtagatgggctgaaattgataactcaagtccgactaggttctctttttatttcccttccttttctattttcctttcttttaattttcatgctttcaaactaaattcaaattcgagttttgaatttcagcttctaaattgtacactaaaattatatgataaggtaacccctactattacttttaatttttttattctaccccatattgtttacttaggggagaataattgacttaatcacattcttccttaggtttcaattctcaatctttcaaatccacatttttagatttctattttgaatttaaataccagtttggatttagagttcaatttcaaaatacacaaccaaaataccagcatgaatgcaaatatattttatgtttatgtatttacttttcttttatactttgctcaaaatagttattttcatgtatgaaactcaataagcaaggaactcacgttattatataacctaataggaataatttaggtaacataatttatcatcctcttgatttaaaagagatatgcctccagaataagacacatactaaaaataactctaatattgaataactaaagtcgtacaaatctctactattattcctataaaataataaagaactagctacaacttctttaaggcattattcagggtttacagcttgagaggcatgaacccatcctgtatactcctggacttggaagacaaaatgtcaaccaaagtgaaaggttttcttatggttgctgctaagagatagattgaacactagatctctcctaagacgtcagggcatgcgtttagactcctacacatgcgaaaactgcatcttacagttggaagaaactatatctcaccacttcctgcggtgtaactttgcccaaagatgttggctcactgttggaatcactccgccccgaactttggatctaacgcttgcagtgctacatattagagcaagactaacaatgccgtggagaatggaaggtattataaccatgtcatggtgcatatggaaatgtcgaaataactggatattcgaaaacataccgccaacggtggcggcctgcaaggaaatgttcaagactgaaatgaactacatctgctaccaagttaagctcgagacaggagctaaaagtagaaactggatacaacactttgtaacatagtgacactccccttttcctttcttttaccttagaactatacatacaatccacattcaataaaaatttgtaggtacgccatacacactaccggaatccggctctttgccgagtgtgaggcgctttgtcgagtgctttttgtccagcactcggcaaaaaagtctttgccatgtgccgcactcggcaaagtcctgctctcggtaacgaccgcgtttaccgagagcaggactctcgacacagaaatacactcgacaaagaaatctttgccgagagccaaacactcggcgaacggcagcgctcggcaaagggtcgtcagccgccgtctaaagctgacggtcgttatctttgtcgagtgccccctcgtccgacactcagtagagcaagcttgccgagtgccatccttggacactcgataaagtatattttatttttttttattttgccaaccaaactttttgtggtatgttcctacactatgtagatctacatgtaccattttggcacaattacaaaaatgttttctataactattagatttagttcgtttatttgaatttcttcggaaaattcacatatgaactgcaagtcactcgaaacatgaaaaaccgtgcatgcaaaataaatgatatgcatgttatctagcacaagttacgaccgaattcagaagcagaccagaatcttcaagcaccatgctcactaaacatgaccgtgaacttgttatccagttgtttaaaaattgtataaaacacaaataaagtcagaaattaatgaaacttgtccacatgtcatgatatcatatatagaggttgtgataaaaatttgataatgtttcggtaaagttgtgacgtactatgtgtagaaacctaagtgacctacacataaaatcatagagtttcaatgtagttcactcgacaaagactttgtcaagtgtccgataaaaagtattcagcaaagaagccgttgtcgatttactgttcgtcgagatctctttgccgagtgtcacactaggcaaagtctttacggagtgtttttcaggctttgacactcggcaaagcgctcgattccagtagtgacagtaatttgcatcaaaaatagccgagagatttaaaatgagtcaactaatagaccaactaattattagctattagtcgttagcttctttaatctaagctaaaaccaactaatagcttatttgttgaattacaattagctcaacggaattctctgttttttctataaaaaaaagggaaactgcccctcatttacagcaaactgtccgctgcctgtcgtccagatacaatgaacgtacctagtaggaactcttttacacgctcggtcgctcgccgcggatcggagtcccaggaacacgacaccactgtggaacacgacaaagtctgctcagaggcggccacaccctggcgtgcaccgagccggagcccggataagcacggtaaggagagtacggcgggacgtggcgacccgtgtgtctgctgccacgcagccttcctccacgtagccgcgcggccgcgccacgtaccagggcccggcgctggtataaatgcgcgccacctccgctttagttctgcatacagccaacccaacacacacccgagcatatcacagtgacagacactacacgggatcctaaaccatgcgcgtgctgctcgtggccctggccctgctggctcttgctgccagcgccacctctgcccagagcgagccggagctgaagctggagagcgtggtgatcgtgagcaggcacggcgtgagggccccgaccaagttcacccagctgatgcaggacgtgaccccggacgcgttctacacctggccggtgaagctgggcgagctgaccccgaggggcggcgagctgatcgcctacctgggccactactggaggcagaggctggtggccgacggcctgctgccgaagaagggctgcccgcagagcggccaggtggccatcatcgccgacgtggacgagaggaccaggaagaccggtgaggccttcgccgccggcctggccccggactgcgccatcaccgtgcacacccaggccgacaccagcagcccggacccgctgttcaacccgctgaagaccggcgtgtgccagctggacgtggcccaggtgaccgacgccatcctggagagggccggcggcagcatcgccgacttcaccggccactaccagaccgccttcagggagctggagagggtgctgaacttcccgcagagcaacctggccctgaagagggagaagcaggacgagagcgccagcctgacccaggccctgccgagcgagctgaaggtgagcgccgacaacgtgagcctgaccggcgcctggagcctggccagcatgctgaccgagattttcctgctgcagcaggcccagggcatgccggagccgggctggggcaggatcaccgacagccaccagtggaacaccctgctgagcctgcacaacgcccagttcgacctgctgcagaggaccccggaggtggccaggagcagggccaccccgctgctggacctgatcaagaccgccctgaccccgcacccgccgcagaagcaggcctacggcgtgaccctgccgaccagcgtgctgttcatcgccggccacgacaccaacctggccaacctgggcggcgccctcgagctgcagtggaccctgccgggccagccggacaacaccccgccgggcggcgagctggtgttcgagaggtggaggaggctgagcgacaacagccagtggattcaggtgagcctggtgttccagaccctgcagcagatgagggacaagaccccgctgttcctgaacaccccgccgggcgaggtgaagctgaccctggccggctgcgaggagaggaacgcccagggcatgtgcagcctggccggcttcacccagatcgtgaacgaggccaggattccggcctgcagcctgagcgagaaggacgagctgtgacctaggtccccgaatttccccgatcgttcaaacatttggcaataaagtttcttaagattgaatcctgttgccggtcttgcgatgattatcatataatttctgttgaattacgttaagcatgtaataattaacatgtaatgcatgacgttatttatgagatgggtttttatgattagagtcccgcaattatacatttaatacgcgatagaaaacaaaatatagcgcgcaaactaggataaattatcgcgcgcggtgtcatctatgttactagatcgggaattg

SEQ ID NO: 146 - DNA, 8297 bp, Artificial Sequence
  Synthetic construct, pAG4811
tccatgctgtcctactacttgcttcatccccttctacattttgttctggtttttggcctgcatttcggatcatgatgtatgtgatttccaatctgctgcaatatgaatggagactctgtgctaaccatcaacaacatgaaatgcttatgaggcctttgctgagcagccaatcttgcctgtgtttatgtcttcacaggccgaattcctctgttttgtttttcaccctcaatatttggaaacatttatctaggttgtttgtgtccaggcctataaatcatacatgatgttgtcgtattggatgtgaatgtggtggcgtgttcagtgccttggatttgagtttgatgagagttgcttctgggtcaccactcaccattatcgatgctcctcttcagcataaggtaaaagtcttccctgtttacgttattttacccactatggttgcttgggttggttttttcctgattgcttatgccatggaaagtcatttgatatgttgaacttgaattaactgtagaattgtatacatgttccatttgtgttgtacttccttcttttctattagtagcctcagatgagtgtgaaaaaaacagattatataacttgccctataaatcatttgaaaaaaatattgtacagtgagaaattgatatatagtgaatttttaagagcatgttttcctaaagaagtatatattttctatgtacaaaggccattgaagtaattgtagatacaggataatgtagactttttggacttacactgctacctttaagtaacaatcatgagcaatagtgttgcaatgatatttaggctgcattcgtttactctcttgatttccatgagcacgcttcccaaactgttaaactctgtgttttttgccaaaaaaaaatgcataggaaagttgcttttaaaaaatcatatcaatccattttttaagttatagctaatacttaattaatcatgcgctaataagtcactctgtttttcgtactagagagattgttttgaaccagcactcaagaacacagccttaacccagccaaataatgctacaacctaccagtccacacctcttgtaaagcatttgttgcatggaaaagctaagatgacagcaacctgttcaggaaaacaactgacaaggtcatagggagagggagcttttggaaaggtgccgtgcagttcaaacaattagttagcagtagggtgttggtttttgctcacagcaataagaagttaatcatggtgtaggcaacccaaataaaacaccaaaatatgcacaaggcagtttgttgtattctgtagtacagacaaaactaaaagtaatgaaagaagatgtggtgttagaaaaggaaacaatatcatgagtaatgtgtgggcattatgggaccacgaaataaaaagaacattttgatgagtcgtgtatcctcgatgagcctcaaaagttctctcaccccggataagaaacccttaagcaatgtgcaaagtttgcattctccactgacataatgcaaaataagatatcatcgatgacatagcaactcatgcatcatatcatgcctctctcaacctattcattcctactcatctacataagtatcttcagctaaatgttagaacataaacccataagtcacgtttgatgagtattaggcgtgacacatgacaaatcacagactcaagcaagataaagcaaaatgatgtgtacataaaactccagagctatatgtcatattgcaaaaagaggagagcttataagacaaggcatgactcacaaaaattcatttgcctttcgtgtcaaaaagaggagggctttacattatccatgtcatattgcaaaagaaagagagaaagaacaacacaatgctgcgtcaattatacatatctgtatgtccatcattattcatccacctttcgtgtaccacacttcatatatcatgagtcacttcatgtctggacattaacaaactctatcttaacatttagatgcaagagcctttatctcactataaatgcacgatgatttctcattgtttctcacaaaaagcattcagttcattagtcctacaacaacggatcctaaaccatgcgcgtgctgctcgtggccctggccctgctggctcttgctgccagcgccacctctgcccagagcgagccggagctgaagctggagagcgtggtgatcgtgagcaggcacggcgtgagggccccgaccaagttcacccagctgatgcaggacgtgaccccggacgcgttctacacctggccggtgaagctgggcgagctgaccccgaggggcggcgagctgatcgcctacctgggccactactggaggcagaggctggtggccgacggcctgctgccgaagaagggctgcccgcagagcggccaggtggccatcatcgccgacgtggacgagaggaccaggaagaccggtgaggccttcgccgccggcctggccccggactgcgccatcaccgtgcacacccaggccgacaccagcagcccggacccgctgttcaacccgctgaagaccggcgtgtgccagctggacgtggcccaggtgaccgacgccatcctggagagggccggcggcagcatcgccgacttcaccggccactaccagaccgccttcagggagctggagagggtgctgaacttcccgcagagcaacctggccctgaagagggagaagcaggacgagagcgccagcctgacccaggccctgccgagcgagctgaaggtgagcgccgacaacgtgagcctgaccggcgcctggagcctggccagcatgctgaccgagattttcctgctgcagcaggcccagggcatgccggagccgggctggggcaggatcaccgacagccaccagtggaacaccctgctgagcctgcacaacgcccagttcgacctgctgcagaggaccccggaggtggccaggagcagggccaccccgctgctggacctgatcaagaccgccctgaccccgcacccgccgcagaagcaggcctacggcgtgaccctgccgaccagcgtgctgttcatcgccggccacgacaccaacctggccaacctgggcggcgccctcgagctgcagtggaccctgccgggccagccggacaacaccccgccgggcggcgagctggtgttcgagaggtggaggaggctgagcgacaacagccagtggattcaggtgagcctggtgttccagaccctgcagcagatgagggacaagaccccgctgttcctgaacaccccgccgggcgaggtgaagctgaccctggccggctgcgaggagaggaacgcccagggcatgtgcagcctggccggcttcacccagatcgtgaacgaggccaggattccggcctgcagcctggacgagctgaaggccgaggccaagtgacctaggtccccgaatttccccgatcgttcaaacatttggcaataaagtttcttaagattgaatcctgttgccggtcttgcgatgattatcatataatttctgttgaattacgttaagcatgtaataattaacatgtaatgcatgacgttatttatgagatgggtttttatgattagagtcccgcaattatacatttaatacgcgatagaaaacaaaatatagcgcgcaaactaggataaattatcgcgcgcggtgtcatctatgttactagatcgggaattgggtacccggtatgaatttggaaacaaattcagtacttttaaaaaaatttgttgtagggagcaaataatacataaaataatttatgcattattttattttttatttgtaataatatgcttgaaacgataattcagtatgcatgttgtgccagtgtactacacgggcggggggaggggattgagtgggccagcgcggtgcgtagggtagatgggctgaaattgataactcaagtccgactaggttctctttttatttcccttccttttctattttcctttcttttaattttcatgctttcaaactaaattcaaattcgagttttgaatttcagcttctaaattgtacactaaaattatatgataaggtaacccctactattacttttaatttttttattctaccccatattgtttacttaggggagaataattgacttaatcacattcttccttaggtttcaattctcaatctttcaaatccacatttttagatttctattttgaatttaaataccagtttggatttagagttcaatttcaaaatacacaaccaaaataccagcatgaatgcaaatatattttatgtttatgtatttacttttcttttatactttgctcaaaatagttattttcatgtatgaaactcaataagcaaggaactcacgttattatataacctaataggaataatttaggtaacataatttatcatcctcttgatttaaaagagatatgcctccagaataagacacatactaaaaataactctaatattgaataactaaagtcgtacaaatctctactattattcctataaaataataaagaactagctacaacttctttaaggcattattcagggtttacagcttgagaggcatgaacccatcctgtatactcctggacttggaagacaaaatgtcaaccaaagtgaaaggttttcttatggttgctgctaagagatagattgaacactagatctctcctaagacgtcagggcatgcgtttagactcctacacatgcgaaaactgcatcttacagttggaagaaactatatctcaccacttcctgcggtgtaactttgcccaaagatgttggctcactgttggaatcactccgccccgaactttggatctaacgcttgcagtgctacatattagagcaagactaacaatgccgtggagaatggaaggtattataaccatgtcatggtgcatatggaaatgtcgaaataactggatattcgaaaacataccgccaacggtggcggcctgcaaggaaatgttcaagactgaaatgaactacatctgctaccaagttaagctcgagacaggagctaaaagtagaaactggatacaacactttgtaacatagtgacactccccttttcctttcttttaccttagaactatacatacaatccacattcaataaaaatttgtaggtacgccatacacactaccggaatccggctctttgccgagtgtgaggcgctttgtcgagtgctttttgtccagcactcggcaaaaaagtctttgccatgtgccgcactcggcaaagtcctgctctcggtaacgaccgcgtttaccgagagcaggactctcgacacagaaatacactcgacaaagaaatctttgccgagagccaaacactcggcgaacggcagcgctcggcaaagggtcgtcagccgccgtctaaagctgacggtcgttatctttgtcgagtgccccctcgtccgacactcagtagagcaagcttgccgagtgccatccttggacactcgataaagtatattttatttttttttattttgccaaccaaactttttgtggtatgttcctacactatgtagatctacatgtaccattttggcacaattacaaaaatgttttctataactattagatttagttcgtttatttgaatttcttcggaaaattcacatatgaactgcaagtcactcgaaacatgaaaaaccgtgcatgcaaaataaatgatatgcatgttatctagcacaagttacgaccgaattcagaagcagaccagaatcttcaagcaccatgctcactaaacatgaccgtgaacttgttatccagttgtttaaaaattgtataaaacacaaataaagtcagaaattaatgaaacttgtccacatgtcatgatatcatatatagaggttgtgataaaaatttgataatgtttcggtaaagttgtgacgtactatgtgtagaaacctaagtgacctacacataaaatcatagagtttcaatgtagttcactcgacaaagactttgtcaagtgtccgataaaaagtattcagcaaagaagccgttgtcgatttactgttcgtcgagatctctttgccgagtgtcacactaggcaaagtctttacggagtgtttttcaggctttgacactcggcaaagcgctcgattccagtagtgacagtaatttgcatcaaaaatagccgagagatttaaaatgagtcaactaatagaccaactaattattagctattagtcgttagcttctttaatctaagctaaaaccaactaatagcttatttgttgaattacaattagctcaacggaattctctgttttttctataaaaaaaagggaaactgcccctcatttacagcaaactgtccgctgcctgtcgtccagatacaatgaacgtacctagtaggaactcttttacacgctcggtcgctcgccgcggatcggagtcccaggaacacgacaccactgtggaacacgacaaagtctgctcagaggcggccacaccctggcgtgcaccgagccggagcccggataagcacggtaaggagagtacggcgggacgtggcgacccgtgtgtctgctgccacgcagccttcctccacgtagccgcgcggccgcgccacgtaccagggcccggcgctggtataaatgcgcgccacctccgctttagttctgcatacagccaacccaacacacacccgagcatatcacagtgacagacactacacgggatcctaaaccatgcgcgtgctgctcgtggccctggccctgctggctcttgctgccagcgccacctctgcccagagcgagccggagctgaagctggagagcgtggtgatcgtgagcaggcacggcgtgagggccccgaccaagttcacccagctgatgcaggacgtgaccccggacgcgttctacacctggccggtgaagctgggcgagctgaccccgaggggcggcgagctgatcgcctacctgggccactactggaggcagaggctggtggccgacggcctgctgccgaagaagggctgcccgcagagcggccaggtggccatcatcgccgacgtggacgagaggaccaggaagaccggtgaggccttcgccgccggcctggccccggactgcgccatcaccgtgcacacccaggccgacaccagcagcccggacccgctgttcaacccgctgaagaccggcgtgtgccagctggacgtggcccaggtgaccgacgccatcctggagagggccggcggcagcatcgccgacttcaccggccactaccagaccgccttcagggagctggagagggtgctgaacttcccgcagagcaacctggccctgaagagggagaagcaggacgagagcgccagcctgacccaggccctgccgagcgagctgaaggtgagcgccgacaacgtgagcctgaccggcgcctggagcctggccagcatgctgaccgagattttcctgctgcagcaggcccagggcatgccggagccgggctggggcaggatcaccgacagccaccagtggaacaccctgctgagcctgcacaacgcccagttcgacctgctgcagaggaccccggaggtggccaggagcagggccaccccgctgctggacctgatcaagaccgccctgaccccgcacccgccgcagaagcaggcctacggcgtgaccctgccgaccagcgtgctgttcatcgccggccacgacaccaacctggccaacctgggcggcgccctcgagctgcagtggaccctgccgggccagccggacaacaccccgccgggcggcgagctggtgttcgagaggtggaggaggctgagcgacaacagccagtggattcaggtgagcctggtgttccagaccctgcagcagatgagggacaagaccccgctgttcctgaacaccccgccgggcgaggtgaagctgaccctggccggctgcgaggagaggaacgcccagggcatgtgcagcctggccggcttcacccagatcgtgaacgaggccaggattccggcctgcagcctgagcgagaaggacgagctgtgacctaggtccccgaatttccccgatcgttcaaacatttggcaataaagtttcttaagattgaatcctgttgccggtcttgcgatgattatcatataatttctgttgaattacgttaagcatgtaataattaacatgtaatgcatgacgttatttatgagatgggtttttatgattagagtcccgcaattatacatttaatacgcgatagaaaacaaaatatagcgcgcaaactaggataaattatcgcgcgcggtgtcatctatgttactagatcgggaattg

SEQ ID NO: 147 - DNA, 7583 bp, Artificial Sequence
  Synthetic construct, pAG4280
aaagtaatcatattattttatgtgtgaatcttctttactttttcatttgattatgattatgaaggtatgaccttcataaccttcgtccgaaatccattatatccaaaggaaaataatgcttcgaaggacgaaggattttgatatttaacattttatgttgccttgttcttaattcatagcatttgagaacaagtccccaacaccaatctttatctttactatattaaagcaccagttcaacgatcgtctcgtgtcaatattattaaaaaactcctacatttctttataatcaacccgcactcttataatctcttctcttactactataataagagagtttatgtacaaaataaggtgaaattatgtataagtgttctggaccttggttgttggctcatattcacacaacctaatcaatagaaaacatatgttttattaaaacaaaatttatcatatatatatatatatatatatatatatatatatatatatataatataaaccgtagcaatgcacaggcatatgactagtggcaacttaataccatgtgtgtattaagatgaataagaggtatccaaataaataacttgttcgcttacgtctggatcgaaaggggttggaaacgattaaatctcttcctagtcaaaattaaatagaaggagatttaatcgatttctcccaatccccttcgatccaggtgcaaccgaataagtccttaaatgttgaggaacacgaaacaaccatgcattggcatgtaaagctccaagaattcgttgtatccttaacaactcacagaacatcaaccaaaattgcacgtcaagggtattgggtaagaaacaatcaaacaaatcctctctgtgtgcaaagaaacacggtgagtcatgccgagatcatactcatctgatatacatgcttacagctcacaagacattacaaacaactcatattgcattacaaagatcgtttcatgaaaaataaaataggccggaacaggacaaaaatccttgacgtgtaaagtaaatttacaacaaaaaaaaagccatatgtcaagctaaatctaattcgttttacgtagatcaacaacctgtagaaggcaacaaaactgagccacgcagaagtacagaatgattccagatgaaccatcgacgtgctacgtaaagagagtgacgagtcatatacatttggcaagaaaccatgaagctgcctacagccgtctcggtggcataagaacacaagaaattgtgttaattaatcaaagctataaataacgctcgcatgcctgtgcacttctccatcaccaccactgggtcttcagaccattagctttatctactccagagcgcagaagaacccgatcgacaccggatcctaaaccatgcgcgtgctgctcgtggccctggccctgctggctcttgctgccagcgccacctctgcccagagcgagccggagctgaagctggagagcgtggtgatcgtgagcaggcacggcgtgagggccccgaccaaggccacccagctgatgcaggacgtgaccccggacgcgttctacacctggccggtgaagctgggcgagctgaccccgaggggcggcgagctgatcgcctacctgggccactactggaggcagaggctggtggccgacggcctgctgccgaagaagggctgcccgcagagcggccaggtggccatcatcgccgacgtggacgagaggaccaggaagaccggcgaggccttcgccgccggcctggccccggactgcgccatcaccgtgcacacccaggccgacaccagcagcccggacccgctgttcaacccgctgaagaccggcgtgtgccagctggacaacgcccaggtgaccgacgccatcctggagagggccggcggcagcatcgccgacttcaccggccactaccagaccgccttcagggagctggagagggtgctgaacttcccgcagagcaacctgtgcctgaagagggagaagcaggacgagagctgcagcctgacccaggccctgccgagcgagctgaaggtgagcgccgacaacgtgagcctgaccggcgccgtgagcctggccagcatgctgaccgagattttcctgctgcagcaggcccagggcatgccggagccgggctggggcaggatcaccgacagccaccagtggaacaccctgctgagcctgcacaacgcccagttcgacctgctgcagaggaccccggaggtggccaggagcagggccaccccgctgctggacctgatcaagaccgccctgaccccgcacccgccgcagaagcaggcctacggcgtgaccctgccgaccagcgtgctgttcatcgccggccacgacaccaacctggccaacctgggcggcgccctcgagctgcagtggaccctgccgggccagccggacaacaccccgccgggcggcgagctggtgttcgagaggtggaggaggctgagcgacaacagccagtggattcaggtgagcctggtgttccagaccctgcagcagatgagggacaagaccccgctgtccctgaacaccccgccgggcgaggtgaagctgaccctggccggctgcgaggagaggaacgcccagggcatgtgcagcctggccggcttcacccagatcgtgaacgaggccaggattccggcctgcagcctgagcgagaaggacgagctgtgacctaggtccccgaatttccccgatcgttcaaacatttggcaataaagtttcttaagattgaatcctgttgccggtcttgcgatgattatcatataatttctgttgaattacgttaagcatgtaataattaacatgtaatgcatgacgttatttatgagatgggtttttatgattagagtcccgcaattatacatttaatacgcgatagaaaacaaaatatagcgcgcaaactaggataaattatcgcgcgcggtgtcatctatgttactagatcgggaattgggtacccggtatgaatttggaaacaaattcagtacttttaaaaaaatttgttgtagggagcaaataatacataaaataatttatgcattattttattttttatttgtaataatatgcttgaaacgataattcagtatgcatgttgtgccagtgtactacacgggcggggggaggggattgagtgggccagcgcggtgcgtagggtagatgggctgaaattgataactcaagtccgactaggttctctttttatttcccttccttttctattttcctttcttttaattttcatgctttcaaactaaattcaaattcgagttttgaatttcagcttctaaattgtacactaaaattatatgataaggtaacccctactattacttttaatttttttattctaccccatattgtttacttaggggagaataattgacttaatcacattcttccttaggtttcaattctcaatctttcaaatccacatttttagatttctattttgaatttaaataccagtttggatttagagttcaatttcaaaatacacaaccaaaataccagcatgaatgcaaatatattttatgtttatgtatttacttttcttttatactttgctcaaaatagttattttcatgtatgaaactcaataagcaaggaactcacgttattatataacctaataggaataatttaggtaacataatttatcatcctcttgatttaaaagagatatgcctccagaataagacacatactaaaaataactctaatattgaataactaaagtcgtacaaatctctactattattcctataaaataataaagaactagctacaacttctttaaggcattattcagggtttacagcttgagaggcatgaacccatcctgtatactcctggacttggaagacaaaatgtcaaccaaagtgaaaggttttcttatggttgctgctaagagatagattgaacactagatctctcctaagacgtcagggcatgcgtttagactcctacacatgcgaaaactgcatcttacagttggaagaaactatatctcaccacttcctgcggtgtaactttgcccaaagatgttggctcactgttggaatcactccgccccgaactttggatctaacgcttgcagtgctacatattagagcaagactaacaatgccgtggagaatggaaggtattataaccatgtcatggtgcatatggaaatgtcgaaataactggatattcgaaaacataccgccaacggtggcggcctgcaaggaaatgttcaagactgaaatgaactacatctgctaccaagttaagctcgagacaggagctaaaagtagaaactggatacaacactttgtaacatagtgacactccccttttcctttcttttaccttagaactatacatacaatccacattcaataaaaatttgtaggtacgccatacacactaccggaatccggctctttgccgagtgtgaggcgctttgtcgagtgctttttgtccagcactcggcaaaaaagtctttgccatgtgccgcactcggcaaagtcctgctctcggtaacgaccgcgtttaccgagagcaggactctcgacacagaaatacactcgacaaagaaatctttgccgagagccaaacactcggcgaacggcagcgctcggcaaagggtcgtcagccgccgtctaaagctgacggtcgttatctttgtcgagtgccccctcgtccgacactcagtagagcaagcttgccgagtgccatccttggacactcgataaagtatattttatttttttttattttgccaaccaaactttttgtggtatgttcctacactatgtagatctacatgtaccattttggcacaattacaaaaatgttttctataactattagatttagttcgtttatttgaatttcttcggaaaattcacatatgaactgcaagtcactcgaaacatgaaaaaccgtgcatgcaaaataaatgatatgcatgttatctagcacaagttacgaccgaattcagaagcagaccagaatcttcaagcaccatgctcactaaacatgaccgtgaacttgttatccagttgtttaaaaattgtataaaacacaaataaagtcagaaattaatgaaacttgtccacatgtcatgatatcatatatagaggttgtgataaaaatttgataatgtttcggtaaagttgtgacgtactatgtgtagaaacctaagtgacctacacataaaatcatagagtttcaatgtagttcactcgacaaagactttgtcaagtgtccgataaaaagtattcagcaaagaagccgttgtcgatttactgttcgtcgagatctctttgccgagtgtcacactaggcaaagtctttacggagtgtttttcaggctttgacactcggcaaagcgctcgattccagtagtgacagtaatttgcatcaaaaatagccgagagatttaaaatgagtcaactaatagaccaactaattattagctattagtcgttagcttctttaatctaagctaaaaccaactaatagcttatttgttgaattacaattagctcaacggaattctctgttttttctataaaaaaaagggaaactgcccctcatttacagcaaactgtccgctgcctgtcgtccagatacaatgaacgtacctagtaggaactcttttacacgctcggtcgctcgccgcggatcggagtcccaggaacacgacaccactgtggaacacgacaaagtctgctcagaggcggccacaccctggcgtgcaccgagccggagcccggataagcacggtaaggagagtacggcgggacgtggcgacccgtgtgtctgctgccacgcagccttcctccacgtagccgcgcggccgcgccacgtaccagggcccggcgctggtataaatgcgcgccacctccgctttagttctgcatacagccaacccaacacacacccgagcatatcacagtgacagacactacacgggatcctaaaccatgcgcgtgctgctcgtggccctggccctgctggctcttgctgccagcgccacctctgcccagagcgagccggagctgaagctggagagcgtggtgatcgtgagcaggcacggcgtgagggccccgaccaaggccacccagctgatgcaggacgtgaccccggacgcgttctacacctggccggtgaagctgggcgagctgaccccgaggggcggcgagctgatcgcctacctgggccactactggaggcagaggctggtggccgacggcctgctgccgaagaagggctgcccgcagagcggccaggtggccatcatcgccgacgtggacgagaggaccaggaagaccggcgaggccttcgccgccggcctggccccggactgcgccatcaccgtgcacacccaggccgacaccagcagcccggacccgctgttcaacccgctgaagaccggcgtgtgccagctggacaacgcccaggtgaccgacgccatcctggagagggccggcggcagcatcgccgacttcaccggccactaccagaccgccttcagggagctggagagggtgctgaacttcccgcagagcaacctgtgcctgaagagggagaagcaggacgagagctgcagcctgacccaggccctgccgagcgagctgaaggtgagcgccgacaacgtgagcctgaccggcgccgtgagcctggccagcatgctgaccgagattttcctgctgcagcaggcccagggcatgccggagccgggctggggcaggatcaccgacagccaccagtggaacaccctgctgagcctgcacaacgcccagttcgacctgctgcagaggaccccggaggtggccaggagcagggccaccccgctgctggacctgatcaagaccgccctgaccccgcacccgccgcagaagcaggcctacggcgtgaccctgccgaccagcgtgctgttcatcgccggccacgacaccaacctggccaacctgggcggcgccctcgagctgcagtggaccctgccgggccagccggacaacaccccgccgggcggcgagctggtgttcgagaggtggaggaggctgagcgacaacagccagtggattcaggtgagcctggtgttccagaccctgcagcagatgagggacaagaccccgctgtccctgaacaccccgccgggcgaggtgaagctgaccctggccggctgcgaggagaggaacgcccagggcatgtgcagcctggccggcttcacccagatcgtgaacgaggccaggattccggcctgcagcctgagcgagaaggacgagctgtgacctaggtccccgaatttccccgatcgttcaaacatttggcaataaagtttcttaagattgaatcctgttgccggtcttgcgatgattatcatataatttctgttgaattacgttaagcatgtaataattaacatgtaatgcatgacgttatttatgagatgggtttttatgattagagtcccgcaattatacatttaatacgcgatagaaaacaaaatatagcgcgcaaactaggataaattatcgcgcgcggtgtcatctatgttactagatcgggaattg

SEQ ID NO: 148 - DNA, 8297 bp, Artificial Sequence
  Synthetic construct, pAG4812
tccatgctgtcctactacttgcttcatccccttctacattttgttctggtttttggcctgcatttcggatcatgatgtatgtgatttccaatctgctgcaatatgaatggagactctgtgctaaccatcaacaacatgaaatgcttatgaggcctttgctgagcagccaatcttgcctgtgtttatgtcttcacaggccgaattcctctgttttgtttttcaccctcaatatttggaaacatttatctaggttgtttgtgtccaggcctataaatcatacatgatgttgtcgtattggatgtgaatgtggtggcgtgttcagtgccttggatttgagtttgatgagagttgcttctgggtcaccactcaccattatcgatgctcctcttcagcataaggtaaaagtcttccctgtttacgttattttacccactatggttgcttgggttggttttttcctgattgcttatgccatggaaagtcatttgatatgttgaacttgaattaactgtagaattgtatacatgttccatttgtgttgtacttccttcttttctattagtagcctcagatgagtgtgaaaaaaacagattatataacttgccctataaatcatttgaaaaaaatattgtacagtgagaaattgatatatagtgaatttttaagagcatgttttcctaaagaagtatatattttctatgtacaaaggccattgaagtaattgtagatacaggataatgtagactttttggacttacactgctacctttaagtaacaatcatgagcaatagtgttgcaatgatatttaggctgcattcgtttactctcttgatttccatgagcacgcttcccaaactgttaaactctgtgttttttgccaaaaaaaaatgcataggaaagttgcttttaaaaaatcatatcaatccattttttaagttatagctaatacttaattaatcatgcgctaataagtcactctgtttttcgtactagagagattgttttgaaccagcactcaagaacacagccttaacccagccaaataatgctacaacctaccagtccacacctcttgtaaagcatttgttgcatggaaaagctaagatgacagcaacctgttcaggaaaacaactgacaaggtcatagggagagggagcttttggaaaggtgccgtgcagttcaaacaattagttagcagtagggtgttggtttttgctcacagcaataagaagttaatcatggtgtaggcaacccaaataaaacaccaaaatatgcacaaggcagtttgttgtattctgtagtacagacaaaactaaaagtaatgaaagaagatgtggtgttagaaaaggaaacaatatcatgagtaatgtgtgggcattatgggaccacgaaataaaaagaacattttgatgagtcgtgtatcctcgatgagcctcaaaagttctctcaccccggataagaaacccttaagcaatgtgcaaagtttgcattctccactgacataatgcaaaataagatatcatcgatgacatagcaactcatgcatcatatcatgcctctctcaacctattcattcctactcatctacataagtatcttcagctaaatgttagaacataaacccataagtcacgtttgatgagtattaggcgtgacacatgacaaatcacagactcaagcaagataaagcaaaatgatgtgtacataaaactccagagctatatgtcatattgcaaaaagaggagagcttataagacaaggcatgactcacaaaaattcatttgcctttcgtgtcaaaaagaggagggctttacattatccatgtcatattgcaaaagaaagagagaaagaacaacacaatgctgcgtcaattatacatatctgtatgtccatcattattcatccacctttcgtgtaccacacttcatatatcatgagtcacttcatgtctggacattaacaaactctatcttaacatttagatgcaagagcctttatctcactataaatgcacgatgatttctcattgtttctcacaaaaagcattcagttcattagtcctacaacaacggatcctaaaccatgcgcgtgctgctcgtggccctggccctgctggctcttgctgccagcgccacctctgcccagagcgagccggagctgaagctggagagcgtggtgatcgtgagcaggcacggcgtgagggccccgaccaaggccacccagctgatgcaggacgtgaccccggacgcgttctacacctggccggtgaagctgggcgagctgaccccgaggggcggcgagctgatcgcctacctgggccactactggaggcagaggctggtggccgacggcctgctgccgaagaagggctgcccgcagagcggccaggtggccatcatcgccgacgtggacgagaggaccaggaagaccggcgaggccttcgccgccggcctggccccggactgcgccatcaccgtgcacacccaggccgacaccagcagcccggacccgctgttcaacccgctgaagaccggcgtgtgccagctggacaacgcccaggtgaccgacgccatcctggagagggccggcggcagcatcgccgacttcaccggccactaccagaccgccttcagggagctggagagggtgctgaacttcccgcagagcaacctgtgcctgaagagggagaagcaggacgagagctgcagcctgacccaggccctgccgagcgagctgaaggtgagcgccgacaacgtgagcctgaccggcgccgtgagcctggccagcatgctgaccgagattttcctgctgcagcaggcccagggcatgccggagccgggctggggcaggatcaccgacagccaccagtggaacaccctgctgagcctgcacaacgcccagttcgacctgctgcagaggaccccggaggtggccaggagcagggccaccccgctgctggacctgatcaagaccgccctgaccccgcacccgccgcagaagcaggcctacggcgtgaccctgccgaccagcgtgctgttcatcgccggccacgacaccaacctggccaacctgggcggcgccctcgagctgcagtggaccctgccgggccagccggacaacaccccgccgggcggcgagctggtgttcgagaggtggaggaggctgagcgacaacagccagtggattcaggtgagcctggtgttccagaccctgcagcagatgagggacaagaccccgctgtccctgaacaccccgccgggcgaggtgaagctgaccctggccggctgcgaggagaggaacgcccagggcatgtgcagcctggccggcttcacccagatcgtgaacgaggccaggattccggcctgcagcctggacgagctgaaggccgaggccaagtgacctaggtccccgaatttccccgatcgttcaaacatttggcaataaagtttcttaagattgaatcctgttgccggtcttgcgatgattatcatataatttctgttgaattacgttaagcatgtaataattaacatgtaatgcatgacgttatttatgagatgggtttttatgattagagtcccgcaattatacatttaatacgcgatagaaaacaaaatatagcgcgcaaactaggataaattatcgcgcgcggtgtcatctatgttactagatcgggaattgggtacccggtatgaatttggaaacaaattcagtacttttaaaaaaatttgttgtagggagcaaataatacataaaataatttatgcattattttattttttatttgtaataatatgcttgaaacgataattcagtatgcatgttgtgccagtgtactacacgggcggggggaggggattgagtgggccagcgcggtgcgtagggtagatgggctgaaattgataactcaagtccgactaggttctctttttatttcccttccttttctattttcctttcttttaattttcatgctttcaaactaaattcaaattcgagttttgaatttcagcttctaaattgtacactaaaattatatgataaggtaacccctactattacttttaatttttttattctaccccatattgtttacttaggggagaataattgacttaatcacattcttccttaggtttcaattctcaatctttcaaatccacatttttagatttctattttgaatttaaataccagtttggatttagagttcaatttcaaaatacacaaccaaaataccagcatgaatgcaaatatattttatgtttatgtatttacttttcttttatactttgctcaaaatagttattttcatgtatgaaactcaataagcaaggaactcacgttattatataacctaataggaataatttaggtaacataatttatcatcctcttgatttaaaagagatatgcctccagaataagacacatactaaaaataactctaatattgaataactaaagtcgtacaaatctctactattattcctataaaataataaagaactagctacaacttctttaaggcattattcagggtttacagcttgagaggcatgaacccatcctgtatactcctggacttggaagacaaaatgtcaaccaaagtgaaaggttttcttatggttgctgctaagagatagattgaacactagatctctcctaagacgtcagggcatgcgtttagactcctacacatgcgaaaactgcatcttacagttggaagaaactatatctcaccacttcctgcggtgtaactttgcccaaagatgttggctcactgttggaatcactccgccccgaactttggatctaacgcttgcagtgctacatattagagcaagactaacaatgccgtggagaatggaaggtattataaccatgtcatggtgcatatggaaatgtcgaaataactggatattcgaaaacataccgccaacggtggcggcctgcaaggaaatgttcaagactgaaatgaactacatctgctaccaagttaagctcgagacaggagctaaaagtagaaactggatacaacactttgtaacatagtgacactccccttttcctttcttttaccttagaactatacatacaatccacattcaataaaaatttgtaggtacgccatacacactaccggaatccggctctttgccgagtgtgaggcgctttgtcgagtgctttttgtccagcactcggcaaaaaagtctttgccatgtgccgcactcggcaaagtcctgctctcggtaacgaccgcgtttaccgagagcaggactctcgacacagaaatacactcgacaaagaaatctttgccgagagccaaacactcggcgaacggcagcgctcggcaaagggtcgtcagccgccgtctaaagctgacggtcgttatctttgtcgagtgccccctcgtccgacactcagtagagcaagcttgccgagtgccatccttggacactcgataaagtatattttatttttttttattttgccaaccaaactttttgtggtatgttcctacactatgtagatctacatgtaccattttggcacaattacaaaaatgttttctataactattagatttagttcgtttatttgaatttcttcggaaaattcacatatgaactgcaagtcactcgaaacatgaaaaaccgtgcatgcaaaataaatgatatgcatgttatctagcacaagttacgaccgaattcagaagcagaccagaatcttcaagcaccatgctcactaaacatgaccgtgaacttgttatccagttgtttaaaaattgtataaaacacaaataaagtcagaaattaatgaaacttgtccacatgtcatgatatcatatatagaggttgtgataaaaatttgataatgtttcggtaaagttgtgacgtactatgtgtagaaacctaagtgacctacacataaaatcatagagtttcaatgtagttcactcgacaaagactttgtcaagtgtccgataaaaagtattcagcaaagaagccgttgtcgatttactgttcgtcgagatctctttgccgagtgtcacactaggcaaagtctttacggagtgtttttcaggctttgacactcggcaaagcgctcgattccagtagtgacagtaatttgcatcaaaaatagccgagagatttaaaatgagtcaactaatagaccaactaattattagctattagtcgttagcttctttaatctaagctaaaaccaactaatagcttatttgttgaattacaattagctcaacggaattctctgttttttctataaaaaaaagggaaactgcccctcatttacagcaaactgtccgctgcctgtcgtccagatacaatgaacgtacctagtaggaactcttttacacgctcggtcgctcgccgcggatcggagtcccaggaacacgacaccactgtggaacacgacaaagtctgctcagaggcggccacaccctggcgtgcaccgagccggagcccggataagcacggtaaggagagtacggcgggacgtggcgacccgtgtgtctgctgccacgcagccttcctccacgtagccgcgcggccgcgccacgtaccagggcccggcgctggtataaatgcgcgccacctccgctttagttctgcatacagccaacccaacacacacccgagcatatcacagtgacagacactacacgggatcctaaaccatgcgcgtgctgctcgtggccctggccctgctggctcttgctgccagcgccacctctgcccagagcgagccggagctgaagctggagagcgtggtgatcgtgagcaggcacggcgtgagggccccgaccaaggccacccagctgatgcaggacgtgaccccggacgcgttctacacctggccggtgaagctgggcgagctgaccccgaggggcggcgagctgatcgcctacctgggccactactggaggcagaggctggtggccgacggcctgctgccgaagaagggctgcccgcagagcggccaggtggccatcatcgccgacgtggacgagaggaccaggaagaccggcgaggccttcgccgccggcctggccccggactgcgccatcaccgtgcacacccaggccgacaccagcagcccggacccgctgttcaacccgctgaagaccggcgtgtgccagctggacaacgcccaggtgaccgacgccatcctggagagggccggcggcagcatcgccgacttcaccggccactaccagaccgccttcagggagctggagagggtgctgaacttcccgcagagcaacctgtgcctgaagagggagaagcaggacgagagctgcagcctgacccaggccctgccgagcgagctgaaggtgagcgccgacaacgtgagcctgaccggcgccgtgagcctggccagcatgctgaccgagattttcctgctgcagcaggcccagggcatgccggagccgggctggggcaggatcaccgacagccaccagtggaacaccctgctgagcctgcacaacgcccagttcgacctgctgcagaggaccccggaggtggccaggagcagggccaccccgctgctggacctgatcaagaccgccctgaccccgcacccgccgcagaagcaggcctacggcgtgaccctgccgaccagcgtgctgttcatcgccggccacgacaccaacctggccaacctgggcggcgccctcgagctgcagtggaccctgccgggccagccggacaacaccccgccgggcggcgagctggtgttcgagaggtggaggaggctgagcgacaacagccagtggattcaggtgagcctggtgttccagaccctgcagcagatgagggacaagaccccgctgtccctgaacaccccgccgggcgaggtgaagctgaccctggccggctgcgaggagaggaacgcccagggcatgtgcagcctggccggcttcacccagatcgtgaacgaggccaggattccggcctgcagcctgagcgagaaggacgagctgtgacctaggtccccgaatttccccgatcgttcaaacatttggcaataaagtttcttaagattgaatcctgttgccggtcttgcgatgattatcatataatttctgttgaattacgttaagcatgtaataattaacatgtaatgcatgacgttatttatgagatgggtttttatgattagagtcccgcaattatacatttaatacgcgatagaaaacaaaatatagcgcgcaaactaggataaattatcgcgcgcggtgtcatctatgttactagatcgggaattg

SEQ ID NO: 149 - DNA, 11265 bp, Artificial Sequence
  Synthetic construct, pAG4758
tccatgctgtcctactacttgcttcatccccttctacattttgttctggtttttggcctgcatttcggatcatgatgtatgtgatttccaatctgctgcaatatgaatggagactctgtgctaaccatcaacaacatgaaatgcttatgaggcctttgctgagcagccaatcttgcctgtgtttatgtcttcacaggccgaattcctctgttttgtttttcaccctcaatatttggaaacatttatctaggttgtttgtgtccaggcctataaatcatacatgatgttgtcgtattggatgtgaatgtggtggcgtgttcagtgccttggatttgagtttgatgagagttgcttctgggtcaccactcaccattatcgatgctcctcttcagcataaggtaaaagtcttccctgtttacgttattttacccactatggttgcttgggttggttttttcctgattgcttatgccatggaaagtcatttgatatgttgaacttgaattaactgtagaattgtatacatgttccatttgtgttgtacttccttcttttctattagtagcctcagatgagtgtgaaaaaaacagattatataacttgccctataaatcatttgaaaaaaatattgtacagtgagaaattgatatatagtgaatttttaagagcatgttttcctaaagaagtatatattttctatgtacaaaggccattgaagtaattgtagatacaggataatgtagactttttggacttacactgctacctttaagtaacaatcatgagcaatagtgttgcaatgatatttaggctgcattcgtttactctcttgatttccatgagcacgcttcccaaactgttaaactctgtgttttttgccaaaaaaaaatgcataggaaagttgcttttaaaaaatcatatcaatccattttttaagttatagctaatacttaattaatcatgcgctaataagtcactctgtttttcgtactagagagattgttttgaaccagcactcaagaacacagccttaacccagccaaataatgctacaacctaccagtccacacctcttgtaaagcatttgttgcatggaaaagctaagatgacagcaacctgttcaggaaaacaactgacaaggtcatagggagagggagcttttggaaaggtgccgtgcagttcaaacaattagttagcagtagggtgttggtttttgctcacagcaataagaagttaatcatggtgtaggcaacccaaataaaacaccaaaatatgcacaaggcagtttgttgtattctgtagtacagacaaaactaaaagtaatgaaagaagatgtggtgttagaaaaggaaacaatatcatgagtaatgtgtgggcattatgggaccacgaaataaaaagaacattttgatgagtcgtgtatcctcgatgagcctcaaaagttctctcaccccggataagaaacccttaagcaatgtgcaaagtttgcattctccactgacataatgcaaaataagatatcatcgatgacatagcaactcatgcatcatatcatgcctctctcaacctattcattcctactcatctacataagtatcttcagctaaatgttagaacataaacccataagtcacgtttgatgagtattaggcgtgacacatgacaaatcacagactcaagcaagataaagcaaaatgatgtgtacataaaactccagagctatatgtcatattgcaaaaagaggagagcttataagacaaggcatgactcacaaaaattcatttgcctttcgtgtcaaaaagaggagggctttacattatccatgtcatattgcaaaagaaagagagaaagaacaacacaatgctgcgtcaattatacatatctgtatgtccatcattattcatccacctttcgtgtaccacacttcatatatcatgagtcacttcatgtctggacattaacaaactctatcttaacatttagatgcaagagcctttatctcactataaatgcacgatgatttctcattgtttctcacaaaaagcattcagttcattagtcctacaacaacggatcctaaaccatgcgcgtgctgctcgtggccctggccctgctggctcttgctgccagcgccacctctgcccagagcgagccggagctgaagctggagagcgtggtgatcgtgagcaggcacggcgtgagggccccgaccaagttcacccagctgatgcaggacgtgaccccggacgcgttctacacctggccggtgaagctgggcgagctgaccccgaggggcggcgagctgatcgcctacctgggccactactggaggcagaggctggtggccgacggcctgctgccgaagaagggctgcccgcagagcggccaggtggccatcatcgccgacgtggacgagaggaccaggaagaccggtgaggccttcgccgccggcctggccccggactgcgccatcaccgtgcacacccaggccgacaccagcagcccggacccgctgttcaacccgctgaagaccggcgtgtgccagctggacgtggcccaggtgaccgacgccatcctggagagggccggcggcagcatcgccgacttcaccggccactaccagaccgccttcagggagctggagagggtgctgaacttcccgcagagcaacctggccctgaagagggagaagcaggacgagagcgccagcctgacccaggccctgccgagcgagctgaaggtgagcgccgacaacgtgagcctgaccggcgcctggagcctggccagcatgctgaccgagattttcctgctgcagcaggcccagggcatgccggagccgggctggggcaggatcaccgacagccaccagtggaacaccctgctgagcctgcacaacgcccagttcgacctgctgcagaggaccccggaggtggccaggagcagggccaccccgctgctggacctgatcaagaccgccctgaccccgcacccgccgcagaagcaggcctacggcgtgaccctgccgaccagcgtgctgttcatcgccggccacgacaccaacctggccaacctgggcggcgccctcgagctgcagtggaccctgccgggccagccggacaacaccccgccgggcggcgagctggtgttcgagaggtggaggaggctgagcgacaacagccagtggattcaggtgagcctggtgttccagaccctgcagcagatgagggacaagaccccgctgttcctgaacaccccgccgggcgaggtgaagctgaccctggccggctgcgaggagaggaacgcccagggcatgtgcagcctggccggcttcacccagatcgtgaacgaggccaggattccggcctgcagcctgagcgagaaggacgagctgtgacctaggtccccgaatttccccgatcgttcaaacatttggcaataaagtttcttaagattgaatcctgttgccggtcttgcgatgattatcatataatttctgttgaattacgttaagcatgtaataattaacatgtaatgcatgacgttatttatgagatgggtttttatgattagagtcccgcaattatacatttaatacgcgatagaaaacaaaatatagcgcgcaaactaggataaattatcgcgcgcggtgtcatctatgttactagatcgggaattgggtaccaaagtaatcatattattttatgtgtgaatcttctttactttttcatttgattatgattatgaaggtatgaccttcataaccttcgtccgaaatccattatatccaaaggaaaataatgcttcgaaggacgaaggattttgatatttaacattttatgttgccttgttcttaattcatagcatttgagaacaagtccccaacaccaatctttatctttactatattaaagcaccagttcaacgatcgtctcgtgtcaatattattaaaaaactcctacatttctttataatcaacccgcactcttataatctcttctcttactactataataagagagtttatgtacaaaataaggtgaaattatgtataagtgttctggaccttggttgttggctcatattcacacaacctaatcaatagaaaacatatgttttattaaaacaaaatttatcatatatatatatatatatatatatatatatatatatatatataatataaaccgtagcaatgcacaggcatatgactagtggcaacttaataccatgtgtgtattaagatgaataagaggtatccaaataaataacttgttcgcttacgtctggatcgaaaggggttggaaacgattaaatctcttcctagtcaaaattaaatagaaggagatttaatcgatttctcccaatccccttcgatccaggtgcaaccgaataagtccttaaatgttgaggaacacgaaacaaccatgcattggcatgtaaagctccaagaattcgttgtatccttaacaactcacagaacatcaaccaaaattgcacgtcaagggtattgggtaagaaacaatcaaacaaatcctctctgtgtgcaaagaaacacggtgagtcatgccgagatcatactcatctgatatacatgcttacagctcacaagacattacaaacaactcatattgcattacaaagatcgtttcatgaaaaataaaataggccggaacaggacaaaaatccttgacgtgtaaagtaaatttacaacaaaaaaaaagccatatgtcaagctaaatctaattcgttttacgtagatcaacaacctgtagaaggcaacaaaactgagccacgcagaagtacagaatgattccagatgaaccatcgacgtgctacgtaaagagagtgacgagtcatatacatttggcaagaaaccatgaagctgcctacagccgtctcggtggcataagaacacaagaaattgtgttaattaatcaaagctataaataacgctcgcatgcctgtgcacttctccatcaccaccactgggtcttcagaccattagctttatctactccagagcgcagaagaacccgatcgacaccggatcctaaaccatgcgcgtgctgctcgtggccctggccctgctggctcttgctgccagcgccacctctgcccagagcgagccggagctgaagctggagagcgtggtgatcgtgagcaggcacggcgtgagggccccgaccaagttcacccagctgatgcaggacgtgaccccggacgcgttctacacctggccggtgaagctgggcgagctgaccccgaggggcggcgagctgatcgcctacctgggccactactggaggcagaggctggtggccgacggcctgctgccgaagaagggctgcccgcagagcggccaggtggccatcatcgccgacgtggacgagaggaccaggaagaccggtgaggccttcgccgccggcctggccccggactgcgccatcaccgtgcacacccaggccgacaccagcagcccggacccgctgttcaacccgctgaagaccggcgtgtgccagctggacgtggcccaggtgaccgacgccatcctggagagggccggcggcagcatcgccgacttcaccggccactaccagaccgccttcagggagctggagagggtgctgaacttcccgcagagcaacctggccctgaagagggagaagcaggacgagagcgccagcctgacccaggccctgccgagcgagctgaaggtgagcgccgacaacgtgagcctgaccggcgcctggagcctggccagcatgctgaccgagattttcctgctgcagcaggcccagggcatgccggagccgggctggggcaggatcaccgacagccaccagtggaacaccctgctgagcctgcacaacgcccagttcgacctgctgcagaggaccccggaggtggccaggagcagggccaccccgctgctggacctgatcaagaccgccctgaccccgcacccgccgcagaagcaggcctacggcgtgaccctgccgaccagcgtgctgttcatcgccggccacgacaccaacctggccaacctgggcggcgccctcgagctgcagtggaccctgccgggccagccggacaacaccccgccgggcggcgagctggtgttcgagaggtggaggaggctgagcgacaacagccagtggattcaggtgagcctggtgttccagaccctgcagcagatgagggacaagaccccgctgttcctgaacaccccgccgggcgaggtgaagctgaccctggccggctgcgaggagaggaacgcccagggcatgtgcagcctggccggcttcacccagatcgtgaacgaggccaggattccggcctgcagcctgagcgagaaggacgagctgtgacctaggtccccgaatttccccgatcgttcaaacatttggcaataaagtttcttaagattgaatcctgttgccggtcttgcgatgattatcatataatttctgttgaattacgttaagcatgtaataattaacatgtaatgcatgacgttatttatgagatgggtttttatgattagagtcccgcaattatacatttaatacgcgatagaaaacaaaatatagcgcgcaaactaggataaattatcgcgcgcggtgtcatctatgttactagatcgggaattgggtacccggtatgaatttggaaacaaattcagtacttttaaaaaaatttgttgtagggagcaaataatacataaaataatttatgcattattttattttttatttgtaataatatgcttgaaacgataattcagtatgcatgttgtgccagtgtactacacgggcggggggaggggattgagtgggccagcgcggtgcgtagggtagatgggctgaaattgataactcaagtccgactaggttctctttttatttcccttccttttctattttcctttcttttaattttcatgctttcaaactaaattcaaattcgagttttgaatttcagcttctaaattgtacactaaaattatatgataaggtaacccctactattacttttaatttttttattctaccccatattgtttacttaggggagaataattgacttaatcacattcttccttaggtttcaattctcaatctttcaaatccacatttttagatttctattttgaatttaaataccagtttggatttagagttcaatttcaaaatacacaaccaaaataccagcatgaatgcaaatatattttatgtttatgtatttacttttcttttatactttgctcaaaatagttattttcatgtatgaaactcaataagcaaggaactcacgttattatataacctaataggaataatttaggtaacataatttatcatcctcttgatttaaaagagatatgcctccagaataagacacatactaaaaataactctaatattgaataactaaagtcgtacaaatctctactattattcctataaaataataaagaactagctacaacttctttaaggcattattcagggtttacagcttgagaggcatgaacccatcctgtatactcctggacttggaagacaaaatgtcaaccaaagtgaaaggttttcttatggttgctgctaagagatagattgaacactagatctctcctaagacgtcagggcatgcgtttagactcctacacatgcgaaaactgcatcttacagttggaagaaactatatctcaccacttcctgcggtgtaactttgcccaaagatgttggctcactgttggaatcactccgccccgaactttggatctaacgcttgcagtgctacatattagagcaagactaacaatgccgtggagaatggaaggtattataaccatgtcatggtgcatatggaaatgtcgaaataactggatattcgaaaacataccgccaacggtggcggcctgcaaggaaatgttcaagactgaaatgaactacatctgctaccaagttaagctcgagacaggagctaaaagtagaaactggatacaacactttgtaacatagtgacactccccttttcctttcttttaccttagaactatacatacaatccacattcaataaaaatttgtaggtacgccatacacactaccggaatccggctctttgccgagtgtgaggcgctttgtcgagtgctttttgtccagcactcggcaaaaaagtctttgccatgtgccgcactcggcaaagtcctgctctcggtaacgaccgcgtttaccgagagcaggactctcgacacagaaatacactcgacaaagaaatctttgccgagagccaaacactcggcgaacggcagcgctcggcaaagggtcgtcagccgccgtctaaagctgacggtcgttatctttgtcgagtgccccctcgtccgacactcagtagagcaagcttgccgagtgccatccttggacactcgataaagtatattttatttttttttattttgccaaccaaactttttgtggtatgttcctacactatgtagatctacatgtaccattttggcacaattacaaaaatgttttctataactattagatttagttcgtttatttgaatttcttcggaaaattcacatatgaactgcaagtcactcgaaacatgaaaaaccgtgcatgcaaaataaatgatatgcatgttatctagcacaagttacgaccgaattcagaagcagaccagaatcttcaagcaccatgctcactaaacatgaccgtgaacttgttatccagttgtttaaaaattgtataaaacacaaataaagtcagaaattaatgaaacttgtccacatgtcatgatatcatatatagaggttgtgataaaaatttgataatgtttcggtaaagttgtgacgtactatgtgtagaaacctaagtgacctacacataaaatcatagagtttcaatgtagttcactcgacaaagactttgtcaagtgtccgataaaaagtattcagcaaagaagccgttgtcgatttactgttcgtcgagatctctttgccgagtgtcacactaggcaaagtctttacggagtgtttttcaggctttgacactcggcaaagcgctcgattccagtagtgacagtaatttgcatcaaaaatagccgagagatttaaaatgagtcaactaatagaccaactaattattagctattagtcgttagcttctttaatctaagctaaaaccaactaatagcttatttgttgaattacaattagctcaacggaattctctgttttttctataaaaaaaagggaaactgcccctcatttacagcaaactgtccgctgcctgtcgtccagatacaatgaacgtacctagtaggaactcttttacacgctcggtcgctcgccgcggatcggagtcccaggaacacgacaccactgtggaacacgacaaagtctgctcagaggcggccacaccctggcgtgcaccgagccggagcccggataagcacggtaaggagagtacggcgggacgtggcgacccgtgtgtctgctgccacgcagccttcctccacgtagccgcgcggccgcgccacgtaccagggcccggcgctggtataaatgcgcgccacctccgctttagttctgcatacagccaacccaacacacacccgagcatatcacagtgacagacactacacgggatcctaaaccatgcgcgtgctgctcgtggccctggccctgctggctcttgctgccagcgccacctctgcccagagcgagccggagctgaagctggagagcgtggtgatcgtgagcaggcacggcgtgagggccccgaccaagttcacccagctgatgcaggacgtgaccccggacgcgttctacacctggccggtgaagctgggcgagctgaccccgaggggcggcgagctgatcgcctacctgggccactactggaggcagaggctggtggccgacggcctgctgccgaagaagggctgcccgcagagcggccaggtggccatcatcgccgacgtggacgagaggaccaggaagaccggtgaggccttcgccgccggcctggccccggactgcgccatcaccgtgcacacccaggccgacaccagcagcccggacccgctgttcaacccgctgaagaccggcgtgtgccagctggacgtggcccaggtgaccgacgccatcctggagagggccggcggcagcatcgccgacttcaccggccactaccagaccgccttcagggagctggagagggtgctgaacttcccgcagagcaacctggccctgaagagggagaagcaggacgagagcgccagcctgacccaggccctgccgagcgagctgaaggtgagcgccgacaacgtgagcctgaccggcgcctggagcctggccagcatgctgaccgagattttcctgctgcagcaggcccagggcatgccggagccgggctggggcaggatcaccgacagccaccagtggaacaccctgctgagcctgcacaacgcccagttcgacctgctgcagaggaccccggaggtggccaggagcagggccaccccgctgctggacctgatcaagaccgccctgaccccgcacccgccgcagaagcaggcctacggcgtgaccctgccgaccagcgtgctgttcatcgccggccacgacaccaacctggccaacctgggcggcgccctcgagctgcagtggaccctgccgggccagccggacaacaccccgccgggcggcgagctggtgttcgagaggtggaggaggctgagcgacaacagccagtggattcaggtgagcctggtgttccagaccctgcagcagatgagggacaagaccccgctgttcctgaacaccccgccgggcgaggtgaagctgaccctggccggctgcgaggagaggaacgcccagggcatgtgcagcctggccggcttcacccagatcgtgaacgaggccaggattccggcctgcagcctgagcgagaaggacgagctgtgacctaggtccccgaatttccccgatcgttcaaacatttggcaataaagtttcttaagattgaatcctgttgccggtcttgcgatgattatcatataatttctgttgaattacgttaagcatgtaataattaacatgtaatgcatgacgttatttatgagatgggtttttatgattagagtcccgcaattatacatttaatacgcgatagaaaacaaaatatagcgcgcaaactaggataaattatcgcgcgcggtgtcatctatgttactagatcgggaattg

SEQ ID NO: 150 - DNA, 28 bp, Zea mays
  misc_feature (1)..(28): PY_15 locus_Deletion
atggggaaagtcgccccgccgatagcga

SEQ ID NO: 151 - DNA, 32132 bp, Artificial Sequence
  Synthetic construct, PY_15 locus T-DNA
atgaatatgtatggcacacacatacagatccaaaattaataaatccaccaggtagtttgaaacagaattctactccgatctagaacgaccgcccaaccagaccacatcatcacaaccaagacaaaaaaaagcatgaaaagatgacccgacaaacaagtgcacggcatatattgaaataaaggaaaagggcaaaccaaaccctatgcaacgaaacaaaaaaaatcatgaaatcgatcccgtctgcggaacggctagagccatcccaggattccccaaagagaaacactggcaagttagcaatcagaacgtgtctgacgtacaggtcgcatccgtgtacgaacgctagcagcacggatctaacacaaacacggatctaacacaaacatgaacagaagtagaactaccgggccctaaccatggaccggaacgccgatctagagaaggtagagagggggggggggggaggacgagcggcgtaccttgaagcggaggtgccgacgggtggatttgggggagatctggttgtgtgtgtgtgcgctccgaacaacacgaggttggggaaagagggtgtggagggggtgtctatttattacggcgggcgaggaagggaaagcgaaggagcggtgggaaaggaatcccccgtagctgccgtgccgtgagaggaggaggaggccgcctgccgtgccggctcacgtctgccgctccgccacgcaatttctggatgccgacagcggagcaagtccaacggtggagcggaactctcgagaggggtccagaggcagcgacagagatgccgtgccgtctgcttcgcttggcccgacgcgacgctgctggttcgctggttggtgtccgttagactcgtcgacggcgtttaacaggctggcattatctactcgaaacaagaaaaatgtttccttagtttttttaatttcttaaagggtatttgtttaatttttagtcactttattttattctattttatatctaaattattaaataaaaaaactaaaatagagttttagttttcttaatttagaggctaaaatagaataaaatagatgtactaaaaaaattagtctataaaaaccattaaccctaaaccctaaatggatgtactaataaaatggatgaagtattatataggtgaagctatttgcaaaaaaaaaggagaacacatgcacactaaaaagataaaactgtagagtcctgttgtcaaaatactcaattgtcctttagaccatgtctaactgttcatttatatgattctctaaaacactgatattattgtagtactatagattatattattcgtagagtaaagtttaaatatatgtataaagatagataaactgcacttcaaacaagtgtgacaaaaaaaatatgtggtaattttttataacttagacatgcaatgctcattatctctagagaggggcacgaccgggtcacgctgcactgcaggaattccaattcccgatctagtaacatagatgacaccgcgcgcgataatttatcctagtttgcgcgctatattttgttttctatcgcgtattaaatgtataattgcgggactctaatcataaaaacccatctcataaataacgtcatgcattacatgttaattattacatgcttaacgtaattcaacagaaattatatgataatcatcgcaagaccggcaacaggattcaatcttaagaaactttattgccaaatgtttgaacgatcggggaaattcggggacctaggtcacagctcgtccttctcgctcaggctgcaggccggaatcctggcctcgttcacgatctgggtgaagccggccaggctgcacatgccctgggcgttcctctcctcgcagccggccagggtcagcttcacctcgcccggcggggtgttcaggaacagcggggtcttgtccctcatctgctgcagggtctggaacaccaggctcacctgaatccactggctgttgtcgctcagcctcctccacctctcgaacaccagctcgccgcccggcggggtgttgtccggctggcccggcagggtccactgcagctcgagggcgccgcccaggttggccaggttggtgtcgtggccggcgatgaacagcacgctggtcggcagggtcacgccgtaggcctgcttctgcggcgggtgcggggtcagggcggtcttgatcaggtccagcagcggggtggccctgctcctggccacctccggggtcctctgcagcaggtcgaactgggcgttgtgcaggctcagcagggtgttccactggtggctgtcggtgatcctgccccagcccggctccggcatgccctgggcctgctgcagcaggaaaatctcggtcagcatgctggccaggctccaggcgccggtcaggctcacgttgtcggcgctcaccttcagctcgctcggcagggcctgggtcaggctggcgctctcgtcctgcttctccctcttcagggccaggttgctctgcgggaagttcagcaccctctccagctccctgaaggcggtctggtagtggccggtgaagtcggcgatgctgccgccggccctctccaggatggcgtcggtcacctgggccacgtccagctggcacacgccggtcttcagcgggttgaacagcgggtccgggctgctggtgtcggcctgggtgtgcacggtgatggcgcagtccggggccaggccggcggcgaaggcctcaccggtcttcctggtcctctcgtccacgtcggcgatgatggccacctggccgctctgcgggcagcccttcttcggcagcaggccgtcggccaccagcctctgcctccagtagtggcccaggtaggcgatcagctcgccgcccctcggggtcagctcgcccagcttcaccggccaggtgtagaacgcgtccggggtcacgtcctgcatcagctgggtgaacttggtcggggccctcacgccgtgcctgctcacgatcaccacgctctccagcttcagctccggctcgctctgggcagaggtggcgctggcagcaagagccagcagggccagggccacgagcagcacgcgcatggtttaggatcccgtgtagtgtctgtcactgtgatatgctcgggtgtgtgttgggttggctgtatgcagaactaaagcggaggtggcgcgcatttataccagcgccgggccctggtacgtggcgcggccgcgcggctacgtggaggaaggctgcgtggcagcagacacacgggtcgccacgtcccgccgtactctccttaccgtgcttatccgggctccggctcggtgcacgccagggtgtggccgcctctgagcagactttgtcgtgttccacagtggtgtcgtgttcctgggactccgatccgcggcgagcgaccgagcgtgtaaaagagttcctactaggtacgttcattgtatctggacgacaggcagcggacagtttgctgtaaatgaggggcagtttcccttttttttatagaaaaaacagagaattccgttgagctaattgtaattcaacaaataagctattagttggttttagcttagattaaagaagctaacgactaatagctaataattagttggtctattagttgactcattttaaatctctcggctatttttgatgcaaattactgtcactactggaatcgagcgctttgccgagtgtcaaagcctgaaaaacactccgtaaagactttgcctagtgtgacactcggcaaagagatctcgacgaacagtaaatcgacaacggcttctttgctgaatactttttatcggacacttgacaaagtctttgtcgagtgaactacattgaaactctatgattttatgtgtaggtcacttaggtttctacacatagtacgtcacaactttaccgaaacattatcaaatttttatcacaacctctatatatgatatcatgacatgtggacaagtttcattaatttctgactttatttgtgttttatacaatttttaaacaactggataacaagttcacggtcatgtttagtgagcatggtgcttgaagattctggtctgcttctgaattcggtcgtaacttgtgctagataacatgcatatcatttattttgcatgcacggtttttcatgtttcgagtgacttgcagttcatatgtgaattttccgaagaaattcaaataaacgaactaaatctaatagttatagaaaacatttttgtaattgtgccaaaatggtacatgtagatctacatagtgtaggaacataccacaaaaagtttggttggcaaaataaaaaaaaataaaatatactttatcgagtgtccaaggatggcactcggcaagcttgctctactgagtgtcggacgagggggcactcgacaaagataacgaccgtcagctttagacggcggctgacgaccctttgccgagcgctgccgttcgccgagtgtttggctctcggcaaagatttctttgtcgagtgtatttctgtgtcgagagtcctgctctcggtaaacgcggtcgttaccgagagcaggactttgccgagtgcggcacatggcaaagacttttttgccgagtgctggacaaaaagcactcgacaaagcgcctcacactcggcaaagagccggattccggtagtgtgtatggcgtacctacaaatttttattgaatgtggattgtatgtatagttctaaggtaaaagaaaggaaaaggggagtgtcactatgttacaaagtgttgtatccagtttctacttttagctcctgtctcgagcttaacttggtagcagatgtagttcatttcagtcttgaacatttccttgcaggccgccaccgttggcggtatgttttcgaatatccagttatttcgacatttccatatgcaccatgacatggttataataccttccattctccacggcattgttagtcttgctctaatatgtagcactgcaagcgttagatccaaagttcggggcggagtgattccaacagtgagccaacatctttgggcaaagttacaccgcaggaagtggtgagatatagtttcttccaactgtaagatgcagttttcgcatgtgtaggagtctaaacgcatgccctgacgtcttaggagagatctagtgttcaatctatctcttagcagcaaccataagaaaacctttcactttggttgacattttgtcttccaagtccaggagtatacaggatgggttcatgcctctcaagctgtaaaccctgaataatgccttaaagaagttgtagctagttctttattattttataggaataatagtagagatttgtacgactttagttattcaatattagagttatttttagtatgtgtcttattctggaggcatatctcttttaaatcaagaggatgataaattatgttacctaaattattcctattaggttatataataacgtgagttccttgcttattgagtttcatacatgaaaataactattttgagcaaagtataaaagaaaagtaaatacataaacataaaatatatttgcattcatgctggtattttggttgtgtattttgaaattgaactctaaatccaaactggtatttaaattcaaaatagaaatctaaaaatgtggatttgaaagattgagaattgaaacctaaggaagaatgtgattaagtcaattattctcccctaagtaaacaatatggggtagaataaaaaaattaaaagtaatagtaggggttaccttatcatataattttagtgtacaatttagaagctgaaattcaaaactcgaatttgaatttagtttgaaagcatgaaaattaaaagaaaggaaaatagaaaaggaagggaaataaaaagagaacctagtcggacttgagttatcaatttcagcccatctaccctacgcaccgcgctggcccactcaatcccctccccccgcccgtgtagtacactggcacaacatgcatactgaattatcgtttcaagcatattattacaaataaaaaataaaataatgcataaattattttatgtattatttgctccctacaacaaatttttttaaaagtactgaatttgtttccaaattcataccgggtacccaattcccgatctagtaacatagatgacaccgcgcgcgataatttatcctagtttgcgcgctatattttgttttctatcgcgtattaaatgtataattgcgggactctaatcataaaaacccatctcataaataacgtcatgcattacatgttaattattacatgcttaacgtaattcaacagaaattatatgataatcatcgcaagaccggcaacaggattcaatcttaagaaactttattgccaaatgtttgaacgatcggggaaattcggggacctaggtcacagctcgtccttctcgctcaggctgcaggccggaatcctggcctcgttcacgatctgggtgaagccggccaggctgcacatgccctgggcgttcctctcctcgcagccggccagggtcagcttcacctcgcccggcggggtgttcaggaacagcggggtcttgtccctcatctgctgcagggtctggaacaccaggctcacctgaatccactggctgttgtcgctcagcctcctccacctctcgaacaccagctcgccgcccggcggggtgttgtccggctggcccggcagggtccactgcagctcgagggcgccgcccaggttggccaggttggtgtcgtggccggcgatgaacagcacgctggtcggcagggtcacgccgtaggcctgcttctgcggcgggtgcggggtcagggcggtcttgatcaggtccagcagcggggtggccctgctcctggccacctccggggtcctctgcagcaggtcgaactgggcgttgtgcaggctcagcagggtgttccactggtggctgtcggtgatcctgccccagcccggctccggcatgccctgggcctgctgcagcaggaaaatctcggtcagcatgctggccaggctccaggcgccggtcaggctcacgttgtcggcgctcaccttcagctcgctcggcagggcctgggtcaggctggcgctctcgtcctgcttctccctcttcagggccaggttgctctgcgggaagttcagcaccctctccagctccctgaaggcggtctggtagtggccggtgaagtcggcgatgctgccgccggccctctccaggatggcgtcggtcacctgggccacgtccagctggcacacgccggtcttcagcgggttgaacagcgggtccgggctgctggtgtcggcctgggtgtgcacggtgatggcgcagtccggggccaggccggcggcgaaggcctcaccggtcttcctggtcctctcgtccacgtcggcgatgatggccacctggccgctctgcgggcagcccttcttcggcagcaggccgtcggccaccagcctctgcctccagtagtggcccaggtaggcgatcagctcgccgcccctcggggtcagctcgcccagcttcaccggccaggtgtagaacgcgtccggggtcacgtcctgcatcagctgggtgaacttggtcggggccctcacgccgtgcctgctcacgatcaccacgctctccagcttcagctccggctcgctctgggcagaggtggcgctggcagcaagagccagcagggccagggccacgagcagcacgcgcatggtttaggatccggtgtcgatcgggttcttctgcgctctggagtagataaagctaatggtctgaagacccagtggtggtgatggagaagtgcacaggcatgcgagcgttatttatagctttgattaattaacacaatttcttgtgttcttatgccaccgagacggctgtaggcagcttcatggtttcttgccaaatgtatatgactcgtcactctctttacgtagcacgtcgatggttcatctggaatcattctgtacttctgcgtggctcagttttgttgccttctacaggttgttgatctacgtaaaacgaattagatttagcttgacatatggctttttttttgttgtaaatttactttacacgtcaaggatttttgtcctgttccggcctattttatttttcatgaaacgatctttgtaatgcaatatgagttgtttgtaatgtcttgtgagctgtaagcatgtatatcagatgagtatgatctcggcatgactcaccgtgtttctttgcacacagagaggatttgtttgattgtttcttacccaatacccttgacgtgcaattttggttgatgttctgtgagttgttaaggatacaacgaattcttggagctttacatgccaatgcatggttgtttcgtgttcctcaacatttaaggacttattcggttgcacctggatcgaaggggattgggagaaatcgattaaatctccttctatttaattttgactaggaagagatttaatcgtttccaacccctttcgatccagacgtaagcgaacaagttatttatttggatacctcttattcatcttaatacacacatggtattaagttgccactagtcatatgcctgtgcattgctacggtttatattatatatatatatatatatatatatatatatatatatatatatgataaattttgttttaataaaacatatgttttctattgattaggttgtgtgaatatgagccaacaaccaaggtccagaacacttatacataatttcaccttattttgtacataaactctcttattatagtagtaagagaagagattataagagtgcgggttgattataaagaaatgtaggagttttttaataatattgacacgagacgatcgttgaactggtgctttaatatagtaaagataaagattggtgttggggacttgttctcaaatgctatgaattaagaacaaggcaacataaaatgttaaatatcaaaatccttcgtccttcgaagcattattttcctttggatataatggatttcggacgaaggttatgaaggtcataccttcataatcataatcaaatgaaaaagtaaagaagattcacacataaaataatatgattactttggtacccaattcccgatctagtaacatagatgacaccgcgcgcgataatttatcctagtttgcgcgctatattttgttttctatcgcgtattaaatgtataattgcgggactctaatcataaaaacccatctcataaataacgtcatgcattacatgttaattattacatgcttaacgtaattcaacagaaattatatgataatcatcgcaagaccggcaacaggattcaatcttaagaaactttattgccaaatgtttgaacgatcggggaaattcggggacctaggtcacagctcgtccttctcgctcaggctgcaggccggaatcctggcctcgttcacgatctgggtgaagccggccaggctgcacatgccctgggcgttcctctcctcgcagccggccagggtcagcttcacctcgcccggcggggtgttcaggaacagcggggtcttgtccctcatctgctgcagggtctggaacaccaggctcacctgaatccactggctgttgtcgctcagcctcctccacctctcgaacaccagctcgccgcccggcggggtgttgtccggctggcccggcagggtccactgcagctcgagggcgccgcccaggttggccaggttggtgtcgtggccggcgatgaacagcacgctggtcggcagggtcacgccgtaggcctgcttctgcggcgggtgcggggtcagggcggtcttgatcaggtccagcagcggggtggccctgctcctggccacctccggggtcctctgcagcaggtcgaactgggcgttgtgcaggctcagcagggtgttccactggtggctgtcggtgatcctgccccagcccggctccggcatgccctgggcctgctgcagcaggaaaatctcggtcagcatgctggccaggctccaggcgccggtcaggctcacgttgtcggcgctcaccttcagctcgctcggcagggcctgggtcaggctggcgctctcgtcctgcttctccctcttcagggccaggttgctctgcgggaagttcagcaccctctccagctccctgaaggcggtctggtagtggccggtgaagtcggcgatgctgccgccggccctctccaggatggcgtcggtcacctgggccacgtccagctggcacacgccggtcttcagcgggttgaacagcgggtccgggctgctggtgtcggcctgggtgtgcacggtgatggcgcagtccggggccaggccggcggcgaaggcctcaccggtcttcctggtcctctcgtccacgtcggcgatgatggccacctggccgctctgcgggcagcccttcttcggcagcaggccgtcggccaccagcctctgcctccagtagtggcccaggtaggcgatcagctcgccgcccctcggggtcagctcgcccagcttcaccggccaggtgtagaacgcgtccggggtcacgtcctgcatcagctgggtgaacttggtcggggccctcacgccgtgcctgctcacgatcaccacgctctccagcttcagctccggctcgctctgggcagaggtggcgctggcagcaagagccagcagggccagggccacgagcagcacgcgcatggtttaggatccgttgttgtaggactaatgaactgaatgctttttgtgagaaacaatgagaaatcatcgtgcatttatagtgagataaaggctcttgcatctaaatgttaagatagagtttgttaatgtccagacatgaagtgactcatgatatatgaagtgtggtacacgaaaggtggatgaataatgatggacatacagatatgtataattgacgcagcattgtgttgttctttctctctttcttttgcaatatgacatggataatgtaaagccctcctctttttgacacgaaaggcaaatgaatttttgtgagtcatgccttgtcttataagctctcctctttttgcaatatgacatatagctctggagttttatgtacacatcattttgctttatcttgcttgagtctgtgatttgtcatgtgtcacgcctaatactcatcaaacgtgacttatgggtttatgttctaacatttagcggagaattaagggagtcacgttatgacccccgccgatgacgcgggacaagccgttttacgtttggaactgacagaaccgcaacgttgaaggagccactcagcctaagcggccgcattggacttaattaagtgaggccggccaagcgtcgatttaaatgtaccacatggcgcgccaactatcatgcgatcgcttcatgtctaactcgagttactggtacgtaccaaatccatggaatcaaggtacctccatgctgtcctactacttgcttcatccccttctacattttgttctggtttttggcctgcatttcggatcatgatgtatgtgatttccaatctgctgcaatatgaatggagactctgtgctaaccatcaacaacatgaaatgcttatgaggcctttgctgagcagccaatcttgcctgtgtttatgtcttcacaggccgaattcctctgttttgtttttcaccctcaatatttggaaacatttatctaggttgtttgtgtccaggcctataaatcatacatgatgttgtcgtattggatgtgaatgtggtggcgtgttcagtgccttggatttgagtttgatgagagttgcttctgggtcaccactcaccattatcgatgctcctcttcagcataaggtaaaagtcttccctgtttacgttattttacccactatggttgcttgggttggttttttcctgattgcttatgccatggaaagtcatttgatatgttgaacttgaattaactgtagaattgtatacatgttccatttgtgttgtacttccttcttttctattagtagcctcagatgagtgtgaaaaaaacagattatataacttgccctataaatcatttgaaaaaaatattgtacagtgagaaattgatatatagtgaatttttaagagcatgttttcctaaagaagtatatattttctatgtacaaaggccattgaagtaattgtagatacaggataatgtagactttttggacttacactgctacctttaagtaacaatcatgagcaatagtgttgcaatgatatttaggctgcattcgtttactctcttgatttccatgagcacgcttcccaaactgttaaactctgtgttttttgccaaaaaaaaatgcataggaaagttgcttttaaaaaatcatatcaatccattttttaagttatagctaatacttaattaatcatgcgctaataagtcactctgtttttcgtactagagagattgttttgaaccagcactcaagaacacagccttaacccagccaaataatgctacaacctaccagtccacacctcttgtaaagcatttgttgcatggaaaagctaagatgacagcaacctgttcaggaaaacaactgacaaggtcatagggagagggagcttttggaaaggtgccgtgcagttcaaacaattagttagcagtagggtgttggtttttgctcacagcaataagaagttaatcatggtgtaggcaacccaaataaaacaccaaaatatgcacaaggcagtttgttgtattctgtagtacagacaaaactaaaagtaatgaaagaagatgtggtgttagaaaaggaaacaatatcatgagtaatgtgtgggcattatgggaccacgaaataaaaagaacattttgatgagtcgtgtatcctcgatgagcctcaaaagttctctcaccccggataagaaacccttaagcaatgtgcaaagtttgcattctccactgacataatgcaaaataagatatcatcgatgacatagcaactcatgcatcatatcatgcctctctcaacctattcattcctactcatctacataagtatcttcagctaaatgttagaacataaacccataagtcacgtttgatgagtattaggcgtgacacatgacaaatcacagactcaagcaagataaagcaaaatgatgtgtacataaaactccagagctatatgtcatattgcaaaaagaggagagcttataagacaaggcatgactcacaaaaattcatttgcctttcgtgtcaaaaagaggagggctttacattatccatgtcatattgcaaaagaaagagagaaagaacaacacaatgctgcgtcaattatacatatctgtatgtccatcattattcatccacctttcgtgtaccacacttcatatatcatgagtcacttcatgtctggacattaacaaactctatcttaacatttagatgcaagagcctttatctcactataaatgcacgatgatttctcattgtttctcacaaaaagcattcagttcattagtcctacaacaacggatcctaaaccatgcgcgtgctgctcgtggccctggccctgctggctcttgctgccagcgccacctctgcccagagcgagccggagctgaagctggagagcgtggtgatcgtgagcaggcacggcgtgagggccccgaccaagttcacccagctgatgcaggacgtgaccccggacgcgttctacacctggccggtgaagctgggcgagctgaccccgaggggcggcgagctgatcgcctacctgggccactactggaggcagaggctggtggccgacggcctgctgccgaagaagggctgcccgcagagcggccaggtggccatcatcgccgacgtggacgagaggaccaggaagaccggtgaggccttcgccgccggcctggccccggactgcgccatcaccgtgcacacccaggccgacaccagcagcccggacccgctgttcaacccgctgaagaccggcgtgtgccagctggacgtggcccaggtgaccgacgccatcctggagagggccggcggcagcatcgccgacttcaccggccactaccagaccgccttcagggagctggagagggtgctgaacttcccgcagagcaacctggccctgaagagggagaagcaggacgagagcgccagcctgacccaggccctgccgagcgagctgaaggtgagcgccgacaacgtgagcctgaccggcgcctggagcctggccagcatgctgaccgagattttcctgctgcagcaggcccagggcatgccggagccgggctggggcaggatcaccgacagccaccagtggaacaccctgctgagcctgcacaacgcccagttcgacctgctgcagaggaccccggaggtggccaggagcagggccaccccgctgctggacctgatcaagaccgccctgaccccgcacccgccgcagaagcaggcctacggcgtgaccctgccgaccagcgtgctgttcatcgccggccacgacaccaacctggccaacctgggcggcgccctcgagctgcagtggaccctgccgggccagccggacaacaccccgccgggcggcgagctggtgttcgagaggtggaggaggctgagcgacaacagccagtggattcaggtgagcctggtgttccagaccctgcagcagatgagggacaagaccccgctgttcctgaacaccccgccgggcgaggtgaagctgaccctggccggctgcgaggagaggaacgcccagggcatgtgcagcctggccggcttcacccagatcgtgaacgaggccaggattccggcctgcagcctgagcgagaaggacgagctgtgacctaggtccccgaatttccccgatcgttcaaacatttggcaataaagtttcttaagattgaatcctgttgccggtcttgcgatgattatcatataatttctgttgaattacgttaagcatgtaataattaacatgtaatgcatgacgttatttatgagatgggtttttatgattagagtcccgcaattatacatttaatacgcgatagaaaacaaaatatagcgcgcaaactaggataaattatcgcgcgcggtgtcatctatgttactagatcgggaattgggtaccaaagtaatcatattattttatgtgtgaatcttctttactttttcatttgattatgattatgaaggtatgaccttcataaccttcgtccgaaatccattatatccaaaggaaaataatgcttcgaaggacgaaggattttgatatttaacattttatgttgccttgttcttaattcatagcatttgagaacaagtccccaacaccaatctttatctttactatattaaagcaccagttcaacgatcgtctcgtgtcaatattattaaaaaactcctacatttctttataatcaacccgcactcttataatctcttctcttactactataataagagagtttatgtacaaaataaggtgaaattatgtataagtgttctggaccttggttgttggctcatattcacacaacctaatcaatagaaaacatatgttttattaaaacaaaatttatcatatatatatatatatatatatatatatatatatatatatataatataaaccgtagcaatgcacaggcatatgactagtggcaacttaataccatgtgtgtattaagatgaataagaggtatccaaataaataacttgttcgcttacgtctggatcgaaaggggttggaaacgattaaatctcttcctagtcaaaattaaatagaaggagatttaatcgatttctcccaatccccttcgatccaggtgcaaccgaataagtccttaaatgttgaggaacacgaaacaaccatgcattggcatgtaaagctccaagaattcgttgtatccttaacaactcacagaacatcaaccaaaattgcacgtcaagggtattgggtaagaaacaatcaaacaaatcctctctgtgtgcaaagaaacacggtgagtcatgccgagatcatactcatctgatatacatgcttacagctcacaagacattacaaacaactcatattgcattacaaagatcgtttcatgaaaaataaaataggccggaacaggacaaaaatccttgacgtgtaaagtaaatttacaacaaaaaaaaagccatatgtcaagctaaatctaattcgttttacgtagatcaacaacctgtagaaggcaacaaaactgagccacgcagaagtacagaatgattccagatgaaccatcgacgtgctacgtaaagagagtgacgagtcatatacatttggcaagaaaccatgaagctgcctacagccgtctcggtggcataagaacacaagaaattgtgttaattaatcaaagctataaataacgctcgcatgcctgtgcacttctccatcaccaccactgggtcttcagaccattagctttatctactccagagcgcagaagaacccgatcgacaccggatcctaaaccatgcgcgtgctgctcgtggccctggccctgctggctcttgctgccagcgccacctctgcccagagcgagccggagctgaagctggagagcgtggtgatcgtgagcaggcacggcgtgagggccccgaccaagttcacccagctgatgcaggacgtgaccccggacgcgttctacacctggccggtgaagctgggcgagctgaccccgaggggcggcgagctgatcgcctacctgggccactactggaggcagaggctggtggccgacggcctgctgccgaagaagggctgcccgcagagcggccaggtggccatcatcgccgacgtggacgagaggaccaggaagaccggtgaggccttcgccgccggcctggccccggactgcgccatcaccgtgcacacccaggccgacaccagcagcccggacccgctgttcaacccgctgaagaccggcgtgtgccagctggacgtggcccaggtgaccgacgccatcctggagagggccggcggcagcatcgccgacttcaccggccactaccagaccgccttcagggagctggagagggtgctgaacttcccgcagagcaacctggccctgaagagggagaagcaggacgagagcgccagcctgacccaggccctgccgagcgagctgaaggtgagcgccgacaacgtgagcctgaccggcgcctggagcctggccagcatgctgaccgagattttcctgctgcagcaggcccagggcatgccggagccgggctggggcaggatcaccgacagccaccagtggaacaccctgctgagcctgcacaacgcccagttcgacctgctgcagaggaccccggaggtggccaggagcagggccaccccgctgctggacctgatcaagaccgccctgaccccgcacccgccgcagaagcaggcctacggcgtgaccctgccgaccagcgtgctgttcatcgccggccacgacaccaacctggccaacctgggcggcgccctcgagctgcagtggaccctgccgggccagccggacaacaccccgccgggcggcgagctggtgttcgagaggtggaggaggctgagcgacaacagccagtggattcaggtgagcctggtgttccagaccctgcagcagatgagggacaagaccccgctgttcctgaacaccccgccgggcgaggtgaagctgaccctggccggctgcgaggagaggaacgcccagggcatgtgcagcctggccggcttcacccagatcgtgaacgaggccaggattccggcctgcagcctgagcgagaaggacgagctgtgacctaggtccccgaatttccccgatcgttcaaacatttggcaataaagtttcttaagattgaatcctgttgccggtcttgcgatgattatcatataatttctgttgaattacgttaagcatgtaataattaacatgtaatgcatgacgttatttatgagatgggtttttatgattagagtcccgcaattatacatttaatacgcgatagaaaacaaaatatagcgcgcaaactaggataaattatcgcgcgcggtgtcatctatgttactagatcgggaattgggtacccggtatgaatttggaaacaaattcagtacttttaaaaaaatttgttgtagggagcaaataatacataaaataatttatgcattattttattttttatttgtaataatatgcttgaaacgataattcagtatgcatgttgtgccagtgtactacacgggcggggggaggggattgagtgggccagcgcggtgcgtagggtagatgggctgaaattgataactcaagtccgactaggttctctttttatttcccttccttttctattttcctttcttttaattttcatgctttcaaactaaattcaaattcgagttttgaatttcagcttctaaattgtacactaaaattatatgataaggtaacccctactattacttttaatttttttattctaccccatattgtttacttaggggagaataattgacttaatcacattcttccttaggtttcaattctcaatctttcaaatccacatttttagatttctattttgaatttaaataccagtttggatttagagttcaatttcaaaatacacaaccaaaataccagcatgaatgcaaatatattttatgtttatgtatttacttttcttttatactttgctcaaaatagttattttcatgtatgaaactcaataagcaaggaactcacgttattatataacctaataggaataatttaggtaacataatttatcatcctcttgatttaaaagagatatgcctccagaataagacacatactaaaaataactctaatattgaataactaaagtcgtacaaatctctactattattcctataaaataataaagaactagctacaacttctttaaggcattattcagggtttacagcttgagaggcatgaacccatcctgtatactcctggacttggaagacaaaatgtcaaccaaagtgaaaggttttcttatggttgctgctaagagatagattgaacactagatctctcctaagacgtcagggcatgcgtttagactcctacacatgcgaaaactgcatcttacagttggaagaaactatatctcaccacttcctgcggtgtaactttgcccaaagatgttggctcactgttggaatcactccgccccgaactttggatctaacgcttgcagtgctacatattagagcaagactaacaatgccgtggagaatggaaggtattataaccatgtcatggtgcatatggaaatgtcgaaataactggatattcgaaaacataccgccaacggtggcggcctgcaaggaaatgttcaagactgaaatgaactacatctgctaccaagttaagctcgagacaggagctaaaagtagaaactggatacaacactttgtaacatagtgacactccccttttcctttcttttaccttagaactatacatacaatccacattcaataaaaatttgtaggtacgccatacacactaccggaatccggctctttgccgagtgtgaggcgctttgtcgagtgctttttgtccagcactcggcaaaaaagtctttgccatgtgccgcactcggcaaagtcctgctctcggtaacgaccgcgtttaccgagagcaggactctcgacacagaaatacactcgacaaagaaatctttgccgagagccaaacactcggcgaacggcagcgctcggcaaagggtcgtcagccgccgtctaaagctgacggtcgttatctttgtcgagtgccccctcgtccgacactcagtagagcaagcttgccgagtgccatccttggacactcgataaagtatattttatttttttttattttgccaaccaaactttttgtggtatgttcctacactatgtagatctacatgtaccattttggcacaattacaaaaatgttttctataactattagatttagttcgtttatttgaatttcttcggaaaattcacatatgaactgcaagtcactcgaaacatgaaaaaccgtgcatgcaaaataaatgatatgcatgttatctagcacaagttacgaccgaattcagaagcagaccagaatcttcaagcaccatgctcactaaacatgaccgtgaacttgttatccagttgtttaaaaattgtataaaacacaaataaagtcagaaattaatgaaacttgtccacatgtcatgatatcatatatagaggttgtgataaaaatttgataatgtttcggtaaagttgtgacgtactatgtgtagaaacctaagtgacctacacataaaatcatagagtttcaatgtagttcactcgacaaagactttgtcaagtgtccgataaaaagtattcagcaaagaagccgttgtcgatttactgttcgtcgagatctctttgccgagtgtcacactaggcaaagtctttacggagtgtttttcaggctttgacactcggcaaagcgctcgattccagtagtgacagtaatttgcatcaaaaatagccgagagatttaaaatgagtcaactaatagaccaactaattattagctattagtcgttagcttctttaatctaagctaaaaccaactaatagcttatttgttgaattacaattagctcaacggaattctctgttttttctataaaaaaaagggaaactgcccctcatttacagcaaactgtccgctgcctgtcgtccagatacaatgaacgtacctagtaggaactcttttacacgctcggtcgctcgccgcggatcggagtcccaggaacacgacaccactgtggaacacgacaaagtctgctcagaggcggccacaccctggcgtgcaccgagccggagcccggataagcacggtaaggagagtacggcgggacgtggcgacccgtgtgtctgctgccacgcagccttcctccacgtagccgcgcggccgcgccacgtaccagggcccggcgctggtataaatgcgcgccacctccgctttagttctgcatacagccaacccaacacacacccgagcatatcacagtgacagacactacacgggatcctaaaccatgcgcgtgctgctcgtggccctggccctgctggctcttgctgccagcgccacctctgcccagagcgagccggagctgaagctggagagcgtggtgatcgtgagcaggcacggcgtgagggccccgaccaagttcacccagctgatgcaggacgtgaccccggacgcgttctacacctggccggtgaagctgggcgagctgaccccgaggggcggcgagctgatcgcctacctgggccactactggaggcagaggctggtggccgacggcctgctgccgaagaagggctgcccgcagagcggccaggtggccatcatcgccgacgtggacgagaggaccaggaagaccggtgaggccttcgccgccggcctggccccggactgcgccatcaccgtgcacacccaggccgacaccagcagcccggacccgctgttcaacccgctgaagaccggcgtgtgccagctggacgtggcccaggtgaccgacgccatcctggagagggccggcggcagcatcgccgacttcaccggccactaccagaccgccttcagggagctggagagggtgctgaacttcccgcagagcaacctggccctgaagagggagaagcaggacgagagcgccagcctgacccaggccctgccgagcgagctgaaggtgagcgccgacaacgtgagcctgaccggcgcctggagcctggccagcatgctgaccgagattttcctgctgcagcaggcccagggcatgccggagccgggctggggcaggatcaccgacagccaccagtggaacaccctgctgagcctgcacaacgcccagttcgacctgctgcagaggaccccggaggtggccaggagcagggccaccccgctgctggacctgatcaagaccgccctgaccccgcacccgccgcagaagcaggcctacggcgtgaccctgccgaccagcgtgctgttcatcgccggccacgacaccaacctggccaacctgggcggcgccctcgagctgcagtggaccctgccgggccagccggacaacaccccgccgggcggcgagctggtgttcgagaggtggaggaggctgagcgacaacagccagtggattcaggtgagcctggtgttccagaccctgcagcagatgagggacaagaccccgctgttcctgaacaccccgccgggcgaggtgaagctgaccctggccggctgcgaggagaggaacgcccagggcatgtgcagcctggccggcttcacccagatcgtgaacgaggccaggattccggcctgcagcctgagcgagaaggacgagctgtgacctaggtccccgaatttccccgatcgttcaaacatttggcaataaagtttcttaagattgaatcctgttgccggtcttgcgatgattatcatataatttctgttgaattacgttaagcatgtaataattaacatgtaatgcatgacgttatttatgagatgggtttttatgattagagtcccgcaattatacatttaatacgcgatagaaaacaaaatatagcgcgcaaactaggataaattatcgcgcgcggtgtcatctatgttactagatcgggaattggaattcctgcagtgcagcgtgacccggtcgtgcccctctctagagataatgagcattgcatgtctaagttataaaaaattaccacatattttttttgtcacacttgtttgaagtgcagtttatctatctttatacatatatttaaactttactctacgaataatataatctatagtactacaataatatcagtgttttagagaatcatataaatgaacagttagacatggtctaaaggacaattgagtattttgacaacaggactctacagttttatctttttagtgtgcatgtgttctcctttttttttgcaaatagcttcacctatataatacttcatccattttattagtacatccatttagggtttagggttaatggtttttatagactaatttttttagtacatctattttattctattttagcctctaaattaagaaaactaaaactctattttagtttttttatttaataatttagatataaaatagaataaaataaagtgactaaaaattaaacaaataccctttaagaaattaaaaaaactaaggaaacatttttcttgtttcgagtagataatgccagcctgttaaacgccgtcgacgagtctaacggacaccaaccagcgaaccagcagcgtcgcgtcgggccaagcgaagcagacggcacggcatctctgtcgctgcctctggacccctctcgagagttccgctccaccgttggacttgctccgctgtcggcatccagaaattgcgtggcggagcggcagacgtgagccggcacggcaggcggcctcctcctcctctcacggcacggcagctacgggggattcctttcccaccgctccttcgctttcccttcctcgcccgccgtaataaatagacaccccctccacaccctctttccccaacctcgtgttgttcggagcgcacacacacacaaccagatctcccccaaatccacccgtcggcacctccgcttcaaggtacgccgctcgtcctccccccccccccctctctaccttctctagatcggcgttccggtccatggttagggcccggtagttctacttctgttcatgtttgtgttagatccgtgtttgtgttagatccgtgctgctagcgttcgtacacggatgcgacctgtacgtcagacacgttctgattgctaacttgccagtgtttctctttggggaatcctgggatggctctagccgttccgcagacgggatcgatttcatgattttttttgtttcgttgcatagggtttggtttgcccttttcctttatttcaatatatgccgtgcacttgtttgtcgggtcatcttttcatgcttttttttgtcttggttgtgatgatgtggtctggttgggcggtcgttctagatcggagtagaattctgtttcaaactacctggtggatttattaattttggatctgtatgtgtgtgccatacatattcatagttacgaattgaagatgatggatggaaatatcgatctaggataggtatacatgttgatgcgggttttactgatgcatatacagagatgctttttgttcgcttggttgtgatgatgtggtgtggttgggcggtcgttcattcgttctagatcggagtagaatactgtttcaaactacctggtgtatttattaattttggaactgtatgtgtgtgtcatacatcttcatagttacgagtttaagatggatggaaatatcgatctaggataggtatacatgttgatgtgggttttactgatgcatatacatgatggcatatgcagcatctattcatatgctctaaccttgagtacctatctattataataaacaagtatgttttataattattttgatcttgatatacttggatgatggcatatgcagcagctatatgtggatttttttagccctgccttcatacgctatttatttgcttggtactgtttcttttgtcgatgctcaccctgttgtttggtgttacttctgcagatgcagaaactcattaactcagtgcaaaactatgcctggggcagcaaaacggcgttgactgaactttatggtatggaaaatccgtccagccagccgatggccgagctgtggatgggcgcacatccgaaaagcagttcacgagtgcagaatgccgccggagatatcgtttcactgcgtgatgtgattgagagtgataaatcgactctgctcggagaggccgttgccaaacgctttggcgaactgcctttcctgttcaaagtattatgcgcagcacagccactctccattcaggttcatccaaacaaacacaattctgaaatcggttttgccaaagaaaatgccgcaggtatcccgatggatgccgccgagcgtaactataaagatcctaaccacaagccggagctggtttttgcgctgacgcctttccttgcgatgaacgcgtttcgtgaattttccgagattgtctccctactccagccggtcgcaggtgcacatccggcgattgctcactttttacaacagcctgatgccgaacgtttaagcgaactgttcgccagcctgttgaatatgcagggtgaagaaaaatcccgcgcgctggcgattttaaaatcggccctcgatagccagcagggtgaaccgtggcaaacgattcgtttaatttctgaattttacccggaagacagcggtctgttctccccgctattgctgaatgtggtgaaattgaaccctggcgaagcgatgttcctgttcgctgaaacaccgcacgcttacctgcaaggcgtggcgctggaagtgatggcaaactccgataacgtgctgcgtgcgggtctgacgcctaaatacattgatattccggaactggttgccaatgtgaaattcgaagccaaaccggctaaccagttgttgacccagccggtgaaacaaggtgcagaactggacttcccgattccagtggatgattttgccttctcgctgcatgaccttagtgataaagaaaccaccattagccagcagagtgccgccattttgttctgcgtcgaaggcgatgcaacgttgtggaaaggttctcagcagttacagcttaaaccgggtgaatcagcgtttattgccgccaacgaatcaccggtgactgtcaaaggccacggccgtttagcgcgtgtttacaacaagctgtaagagcttactgaaaaaattaacatctcttgctaagctgggagctctagatccccgaatttccccgatcgttcaaacatttggcaataaagtttcttaagattgaatcctgttgccggtcttgcgatgattatcatataatttctgttgaattacgttaagcatgtaataattaacatgtaatgcatgacgttatttatgagatgggtttttatgattagagtcccgcaattatacatttaatacgcgatagaaaacaaaatatagcgcgcaaactaggataaattatcgcgcgcggtgtcatctatgttactagatcgggaattggcgagctcgaattaattcagtacattaaaaacgtccgcaatgtgttattaagttgtctaagcgtcaatttgtttacaccacaatttgtttcaaacactgatagtttaaactgaaggcgggaaacgacaacctgatcatgagcggagaattaagggagtcacgttatgacccccgccgatgacgcgggacaagccgttttacgtttggaactgacagaaccgcaacgttgaaggagccactcagcctaagcggccgcattggacttaattaagtgaggccggccaagcgtcgatttaaatgtaccacatggcgcgccaactatcatgcgatcgcttcatgtctaactcgagttactggtacgtaccaaatccatggaatcaaggtacctccatgctgtcctactacttgcttcatccccttctacattttgttctggtttttggcctgcatttcggatcatgatgtatgtgatttccaatctgctgcaatatgaatggagactctgtgctaaccatcaacaacatgaaatgcttatgaggcctttgctgagcagccaatcttgcctgtgtttatgtcttcacaggccgaattcctctgttttgtttttcaccctcaatatttggaaacatttatctaggttgtttgtgtccaggcctataaatcatacatgatgttgtcgtattggatgtgaatgtggtggcgtgttcagtgccttggatttgagtttgatgagagttgcttctgggtcaccactcaccattatcgatgctcctcttcagcataaggtaaaagtcttccctgtttacgttattttacccactatggttgcttgggttggttttttcctgattgcttatgccatggaaagtcatttgatatgttgaacttgaattaactgtagaattgtatacatgttccatttgtgttgtacttccttcttttctattagtagcctcagatgagtgtgaaaaaaacagattatataacttgccctataaatcatttgaaaaaaatattgtacagtgagaaattgatatatagtgaatttttaagagcatgttttcctaaagaagtatatattttctatgtacaaaggccattgaagtaattgtagatacaggataatgtagactttttggacttacactgctacctttaagtaacaatcatgagcaatagtgttgcaatgatatttaggctgcattcgtttactctcttgatttccatgagcacgcttcccaaactgttaaactctgtgttttttgccaaaaaaaaatgcataggaaagttgcttttaaaaaatcatatcaatccattttttaagttatagctaatacttaattaatcatgcgctaataagtcactctgtttttcgtactagagagattgttttgaaccagcactcaagaacacagccttaacccagccaaataatgctacaacctaccagtccacacctcttgtaaagcatttgttgcatggaaaagctaagatgacagcaacctgttcaggaaaacaactgacaaggtcatagggagagggagcttttggaaaggtgccgtgcagttcaaacaattagttagcagtagggtgttggtttttgctcacagcaataagaagttaatcatggtgtaggcaacccaaataaaacaccaaaatatgcacaaggcagtttgttgtattctgtagtacagacaaaactaaaagtaatgaaagaagatgtggtgttagaaaaggaaacaatatcatgagtaatgtgtgggcattatgggaccacgaaataaaaagaacattttgatgagtcgtgtatcctcgatgagcctcaaaagttctctcaccccggataagaaacccttaagcaatgtgcaaagtttgcattctccactgacataatgcaaaataagatatcatcgatgacatagcaactcatgcatcatatcatgcctctctcaacctattcattcctactcatctacataagtatcttcagctaaatgttagaacataaacccataagtcacgtttgatgagtattaggcgtgacacatgacaaatcacagactcaagcaagataaagcaaaatgatgtgtacataaaactccagagctatatgtcatattgcaaaaagaggagagcttataagacaaggcatgactcacaaaaattcatttgcctttcgtgtcaaaaagaggagggctttacattatccatgtcatattgcaaaagaaagagagaaagaacaacacaatgctgcgtcaattatacatatctgtatgtccatcattattcatccacctttcgtgtaccacacttcatatatcatgagtcacttcatgtctggatacacgactgatagtttaaactgaaggcgggaaacgacaacctgatcatgagcggagaattaagggagtcacgttatgacccccgccgatgacgcgggacaagccgttttacgtttggaactgacagaaccgcaacgttgaaggagccactcagcctaagcggccgcattggacttaattaagtgaggccggccaagcgtcgatttaaatgtaccacatggcgcgccaactatcatgcgatcgcttcatgtctaactcgagttactggtacgtaccaaatccatggaatcaaggtacctccatgctgtcctactacttgcttcatccccttctacattttgttctggtttttggcctgcatttcggatcatgatgtatgtgatttccaatctgctgcaatatgaatggagactctgtgctaaccatcaacaacatgaaatgcttatgaggcctttgctgagcagccaatcttgcctgtgtttatgtcttcacaggccgaattcctctgttttgtttttcaccctcaatatttggaaacatttatctaggttgtttgtgtccaggcctataaatcatacatgatgttgtcgtattggatgtgaatgtggtggcgtgttcagtgccttggatttgagtttgatgagagttgcttctgggtcaccactcaccattatcgatgctcctcttcagcataaggtaaaagtcttccctgtttacgttattttacccactatggttgcttgggttggttttttcctgattgcttatgccatggaaagtcatttgatatgttgaacttgaattaactgtagaattgtatacatgttccatttgtgttgtacttccttcttttctattagtagcctcagatgagtgtgaaaaaaacagattatataacttgccctataaatcatttgaaaaaaatattgtacagtgagaaattgatatatagtgaatttttaagagcatgttttcctaaagaagtatatattttctatgtacaaaggccattgaagtaattgtagatacaggataatgtagactttttggacttacactgctacctttaagtaacaatcatgagcaatagtgttgcaatgatatttaggctgcattcgtttactctcttgatttccatgagcacgcttcccaaactgttaaactctgtgttttttgccaaaaaaaaatgcataggaaagttgcttttaaaaaatcatatcaatccattttttaagttatagctaatacttaattaatcatgcgctaataagtcactctgtttttcgtactagagagattgttttgaaccagcactcaagaacacagccttaacccagccaaataatgctacaacctaccagtccacacctcttgtaaagcatttgttgcatggaaaagctaagatgacagcaacctgttcaggaaaacaactgacaaggtcatagggagagggagcttttggaaaggtgccgtgcagttcaaacaattagttagcagtagggtgttggtttttgctcacagcaataagaagttaatcatggtgtaggcaacccaaataaaacaccaaaatatgcacaaggcagtttgttgtattctgtagtacagacaaaactaaaagtaatgaaagaagatgtggtgttagaaaaggaaacaatatcatgagtaatgtgtgggcattatgggaccacgaaataaaaagaacattttgatgagtcgtgtatcctcgatgagcctcaaaagttctctcaccccggataagaaacccttaagcaatgtgcaaagtttgcattctccactgacataatgcaaaataagatatcatcgatgacatagcaactcatgcatcatatcatgcctctctcaacctattcattcctactcatctacataagtatcttcagctaaatgttagaacataaacccataagtcacgtttgatgagtattaggcgtgacacatgacaaatcacagactcaagcaagataaagcaaaatgatgtgtacataaaactccagagctatatgtcatattgcaaaaagaggagagcttataagacaaggcatgactcacaaaaattcatttgcctttcgtgtcaaaaagaggagggctttacattatccatgtcatattgcaaaagaaagagagaaagaacaacacaatgctgcgtcaattatacatatctgtatgtccatcattattcatccacctttcgtgtaccacacttcatatatcatgagtcacttcatgtctggacattaacaaactctatcttaacatttagatgcaagagcctttatctcactataaatgcacgatgatttctcattgtttctcacaaaaagcattcagttcattagtcctacaacaacggatcctaaaccatgcgcgtgctgctcgtggccctggccctgctggctcttgctgccagcgccacctctgcccagagcgagccggagctgaagctggagagcgtggtgatcgtgagcaggcacggcgtgagggccccgaccaagttcacccagctgatgcaggacgtgaccccggacgcgttctacacctggccggtgaagctgggcgagctgaccccgaggggcggcgagctgatcgcctacctgggccactactggaggcagaggctggtggccgacggcctgctgccgaagaagggctgcccgcagagcggccaggtggccatcatcgccgacgtggacgagaggaccaggaagaccggtgaggccttcgccgccggcctggccccggactgcgccatcaccgtgcacacccaggccgacaccagcagcccggacccgctgttcaacccgctgaagaccggcgtgtgccagctggacgtggcccaggtgaccgacgccatcctggagagggccggcggcagcatcgccgacttcaccggccactaccagaccgccttcagggagctggagagggtgctgaacttcccgcagagcaacctggccctgaagagggagaagcaggacgagagcgccagcctgacccaggccctgccgagcgagctgaaggtgagcgccgacaacgtgagcctgaccggcgcctggagcctggccagcatgctgaccgagattttcctgctgcagcaggcccagggcatgccggagccgggctggggcaggatcaccgacagccaccagtggaacaccctgctgagcctgcacaacgcccagttcgacctgctgcagaggaccccggaggtggccaggagcagggccaccccgctgctggacctgatcaagaccgccctgaccccgcacccgccgcagaagcaggcctacggcgtgaccctgccgaccagcgtgctgttcatcgccggccacgacaccaacctggccaacctgggcggcgccctcgagctgcagtggaccctgccgggccagccggacaacaccccgccgggcggcgagctggtgttcgagaggtggaggaggctgagcgacaacagccagtggattcaggtgagcctggtgttccagaccctgcagcagatgagggacaagaccccgctgttcctgaacaccccgccgggcgaggtgaagctgaccctggccggctgcgaggagaggaacgcccagggcatgtgcagcctggccggcttcacccagatcgtgaacgaggcgat

SEQ ID NO: 152 - DNA, 15147 bp, Artificial Sequence
  Synthetic construct, 3293_Locus_T-DNA
cactgatagtttaaactgaaggcgggaaacgacaacctgatcatgagcggagaattaagggagtcacgttatgacccccgccgatgacgcgggacaagccgttttacgtttggaactgacagaaccgcaacgttgaaggagccactcagcctaagcggccgcattggacttaattaagtgaggccggccaagcgtcgatttaaatgtaccacatggcgcgccaactatcatgcgatcgcttcatgtctaactcgagttactggtacgtaccaaatccatggaatcaaggtacctccatgctgtcctactacttgcttcatccccttctacattttgttctggtttttggcctgcatttcggatcatgatgtatgtgatttccaatctgctgcaatatgaatggagactctgtgctaaccatcaacaacatgaaatgcttatgaggcctttgctgagcagccaatcttgcctgtgtttatgtcttcacaggccgaattcctctgttttgtttttcaccctcaatatttggaaacatttatctaggttgtttgtgtccaggcctataaatcatacatgatgttgtcgtattggatgtgaatgtggtggcgtgttcagtgccttggatttgagtttgatgagagttgcttctgggtcaccactcaccattatcgatgctcctcttcagcataaggtaaaagtcttccctgtttacgttattttacccactatggttgcttgggttggttttttcctgattgcttatgccatggaaagtcatttgatatgttgaacttgaattaactgtagaattgtatacatgttccatttgtgttgtacttccttcttttctattagtagcctcagatgagtgtgaaaaaaacagattatataacttgccctataaatcatttgaaaaaaatattgtacagtgagaaattgatatatagtgaatttttaagagcatgttttcctaaagaagtatatattttctatgtacaaaggccattgaagtaattgtagatacaggataatgtagactttttggacttacactgctacctttaagtaacaatcatgagcaatagtgttgcaatgatatttaggctgcattcgtttactctcttgatttccatgagcacgcttcccaaactgttaaactctgtgttttttgccaaaaaaaaatgcataggaaagttgcttttaaaaaatcatatcaatccattttttaagttatagctaatacttaattaatcatgcgctaataagtcactctgtttttcgtactagagagattgttttgaaccagcactcaagaacacagccttaacccagccaaataatgctacaacctaccagtccacacctcttgtaaagcatttgttgcatggaaaagctaagatgacagcaacctgttcaggaaaacaactgacaaggtcatagggagagggagcttttggaaaggtgccgtgcagttcaaacaattagttagcagtagggtgttggtttttgctcacagcaataagaagttaatcatggtgtaggcaacccaaataaaacaccaaaatatgcacaaggcagtttgttgtattctgtagtacagacaaaactaaaagtaatgaaagaagatgtggtgttagaaaaggaaacaatatcatgagtaatgtgtgggcattatgggaccacgaaataaaaagaacattttgatgagtcgtgtatcctcgatgagcctcaaaagttctctcaccccggataagaaacccttaagcaatgtgcaaagtttgcattctccactgacataatgcaaaataagatatcatcgatgacatagcaactcatgcatcatatcatgcctctctcaacctattcattcctactcatctacataagtatcttcagctaaatgttagaacataaacccataagtcacgtttgatgagtattaggcgtgacacatgacaaatcacagactcaagcaagataaagcaaaatgatgtgtacataaaactccagagctatatgtcatattgcaaaaagaggagagcttataagacaaggcatgactcacaaaaattcatttgcctttcgtgtcaaaaagaggagggctttacattatccatgtcatattgcaaaagaaagagagaaagaacaacacaatgctgcgtcaattatacatatctgtatgtccatcattattcatccacctttcgtgtaccacacttcatatatcatgagtcacttcatgtctggacattaacaaactctatcttaacatttagatgcaagagcctttatctcactataaatgcacgatgatttctcattgtttctcacaaaaagcattcagttcattagtcctacaacaacggatcctaaaccatgcgcgtgctgctcgtggccctggccctgctggctcttgctgccagcgccacctctgcccagagcgagccggagctgaagctggagagcgtggtgatcgtgagcaggcacggcgtgagggccccgaccaagttcacccagctgatgcaggacgtgaccccggacgcgttctacacctggccggtgaagctgggcgagctgaccccgaggggcggcgagctgatcgcctacctgggccactactggaggcagaggctggtggccgacggcctgctgccgaagaagggctgcccgcagagcggccaggtggccatcatcgccgacgtggacgagaggaccaggaagaccggtgaggccttcgccgccggcctggccccggactgcgccatcaccgtgcacacccaggccgacaccagcagcccggacccgctgttcaacccgctgaagaccggcgtgtgccagctggacgtggcccaggtgaccgacgccatcctggagagggccggcggcagcatcgccgacttcaccggccactaccagaccgccttcagggagctggagagggtgctgaacttcccgcagagcaacctggccctgaagagggagaagcaggacgagagcgccagcctgacccaggccctgccgagcgagctgaaggtgagcgccgacaacgtgagcctgaccggcgcctggagcctggccagcatgctgaccgagattttcctgctgcagcaggcccagggcatgccggagccgggctggggcaggatcaccgacagccaccagtggaacaccctgctgagcctgcacaacgcccagttcgacctgctgcagaggaccccggaggtggccaggagcagggccaccccgctgctggacctgatcaagaccgccctgaccccgcacccgccgcagaagcaggcctacggcgtgaccctgccgaccagcgtgctgttcatcgccggccacgacaccaacctggccaacctgggcggcgccctcgagctgcagtggaccctgccgggccagccggacaacaccccgccgggcggcgagctggtgttcgagaggtggaggaggctgagcgacaacagccagtggattcaggtgagcctggtgttccagaccctgcagcagatgagggacaagaccccgctgttcctgaacaccccgccgggcgaggtgaagctgaccctggccggctgcgaggagaggaacgcccagggcatgtgcagcctggccggcttcacccagatcgtgaacgaggccaggattccggcctgcagcctgagcgagaaggacgagctgtgacctaggtccccgaatttccccgatcgttcaaacatttggcaataaagtttcttaagattgaatcctgttgccggtcttgcgatgattatcatataatttctgttgaattacgttaagcatgtaataattaacatgtaatgcatgacgttatttatgagatgggtttttatgattagagtcccgcaattatacatttaatacgcgatagaaaacaaaatatagcgcgcaaactaggataaattatcgcgcgcggtgtcatctatgttactagatcgggaattgggtaccaaagtaatcatattattttatgtgtgaatcttctttactttttcatttgattatgattatgaaggtatgaccttcataaccttcgtccgaaatccattatatccaaaggaaaataatgcttcgaaggacgaaggattttgatatttaacattttatgttgccttgttcttaattcatagcatttgagaacaagtccccaacaccaatctttatctttactatattaaagcaccagttcaacgatcgtctcgtgtcaatattattaaaaaactcctacatttctttataatcaacccgcactcttataatctcttctcttactactataataagagagtttatgtacaaaataaggtgaaattatgtataagtgttctggaccttggttgttggctcatattcacacaacctaatcaatagaaaacatatgttttattaaaacaaaatttatcatatatatatatatatatatatatatatatatatatatatataatataaaccgtagcaatgcacaggcatatgactagtggcaacttaataccatgtgtgtattaagatgaataagaggtatccaaataaataacttgttcgcttacgtctggatcgaaaggggttggaaacgattaaatctcttcctagtcaaaattaaatagaaggagatttaatcgatttctcccaatccccttcgatccaggtgcaaccgaataagtccttaaatgttgaggaacacgaaacaaccatgcattggcatgtaaagctccaagaattcgttgtatccttaacaactcacagaacatcaaccaaaattgcacgtcaagggtattgggtaagaaacaatcaaacaaatcctctctgtgtgcaaagaaacacggtgagtcatgccgagatcatactcatctgatatacatgcttacagctcacaagacattacaaacaactcatattgcattacaaagatcgtttcatgaaaaataaaataggccggaacaggacaaaaatccttgacgtgtaaagtaaatttacaacaaaaaaaaagccatatgtcaagctaaatctaattcgttttacgtagatcaacaacctgtagaaggcaacaaaactgagccacgcagaagtacagaatgattccagatgaaccatcgacgtgctacgtaaagagagtgacgagtcatatacatttggcaagaaaccatgaagctgcctacagccgtctcggtggcataagaacacaagaaattgtgttaattaatcaaagctataaataacgctcgcatgcctgtgcacttctccatcaccaccactgggtcttcagaccattagctttatctactccagagcgcagaagaacccgatcgacaccggatcctaaaccatgcgcgtgctgctcgtggccctggccctgctggctcttgctgccagcgccacctctgcccagagcgagccggagctgaagctggagagcgtggtgatcgtgagcaggcacggcgtgagggccccgaccaagttcacccagctgatgcaggacgtgaccccggacgcgttctacacctggccggtgaagctgggcgagctgaccccgaggggcggcgagctgatcgcctacctgggccactactggaggcagaggctggtggccgacggcctgctgccgaagaagggctgcccgcagagcggccaggtggccatcatcgccgacgtggacgagaggaccaggaagaccggtgaggccttcgccgccggcctggccccggactgcgccatcaccgtgcacacccaggccgacaccagcagcccggacccgctgttcaacccgctgaagaccggcgtgtgccagctggacgtggcccaggtgaccgacgccatcctggagagggccggcggcagcatcgccgacttcaccggccactaccagaccgccttcagggagctggagagggtgctgaacttcccgcagagcaacctggccctgaagagggagaagcaggacgagagcgccagcctgacccaggccctgccgagcgagctgaaggtgagcgccgacaacgtgagcctgaccggcgcctggagcctggccagcatgctgaccgagattttcctgctgcagcaggcccagggcatgccggagccgggctggggcaggatcaccgacagccaccagtggaacaccctgctgagcctgcacaacgcccagttcgacctgctgcagaggaccccggaggtggccaggagcagggccaccccgctgctggacctgatcaagaccgccctgaccccgcacccgccgcagaagcaggcctacggcgtgaccctgccgaccagcgtgctgttcatcgccggccacgacaccaacctggccaacctgggcggcgccctcgagctgcagtggaccctgccgggccagccggacaacaccccgccgggcggcgagctggtgttcgagaggtggaggaggctgagcgacaacagccagtggattcaggtgagcctggtgttccagaccctgcagcagatgagggacaagaccccgctgttcctgaacaccccgccgggcgaggtgaagctgaccctggccggctgcgaggagaggaacgcccagggcatgtgcagcctggccggcttcacccagatcgtgaacgaggccaggattccggcctgcagcctgagcgagaaggacgagctgtgacctaggtccccgaatttccccgatcgttcaaacatttggcaataaagtttcttaagattgaatcctgttgccggtcttgcgatgattatcatataatttctgttgaattacgttaagcatgtaataattaacatgtaatgcatgacgttatttatgagatgggtttttatgattagagtcccgcaattatacatttaatacgcgatagaaaacaaaatatagcgcgcaaactaggataaattatcgcgcgcggtgtcatctatgttactagatcgggaattgggtacccggtatgaatttggaaacaaattcagtacttttaaaaaaatttgttgtagggagcaaataatacataaaataatttatgcattattttattttttatttgtaataatatgcttgaaacgataattcagtatgcatgttgtgccagtgtactacacgggcggggggaggggattgagtgggccagcgcggtgcgtagggtagatgggctgaaattgataactcaagtccgactaggttctctttttatttcccttccttttctattttcctttcttttaattttcatgctttcaaactaaattcaaattcgagttttgaatttcagcttctaaattgtacactaaaattatatgataaggtaacccctactattacttttaatttttttattctaccccatattgtttacttaggggagaataattgacttaatcacattcttccttaggtttcaattctcaatctttcaaatccacatttttagatttctattttgaatttaaataccagtttggatttagagttcaatttcaaaatacacaaccaaaataccagcatgaatgcaaatatattttatgtttatgtatttacttttcttttatactttgctcaaaatagttattttcatgtatgaaactcaataagcaaggaactcacgttattatataacctaataggaataatttaggtaacataatttatcatcctcttgatttaaaagagatatgcctccagaataagacacatactaaaaataactctaatattgaataactaaagtcgtacaaatctctactattattcctataaaataataaagaactagctacaacttctttaaggcattattcagggtttacagcttgagaggcatgaacccatcctgtatactcctggacttggaagacaaaatgtcaaccaaagtgaaaggttttcttatggttgctgctaagagatagattgaacactagatctctcctaagacgtcagggcatgcgtttagactcctacacatgcgaaaactgcatcttacagttggaagaaactatatctcaccacttcctgcggtgtaactttgcccaaagatgttggctcactgttggaatcactccgccccgaactttggatctaacgcttgcagtgctacatattagagcaagactaacaatgccgtggagaatggaaggtattataaccatgtcatggtgcatatggaaatgtcgaaataactggatattcgaaaacataccgccaacggtggcggcctgcaaggaaatgttcaagactgaaatgaactacatctgctaccaagttaagctcgagacaggagctaaaagtagaaactggatacaacactttgtaacatagtgacactccccttttcctttcttttaccttagaactatacatacaatccacattcaataaaaatttgtaggtacgccatacacactaccggaatccggctctttgccgagtgtgaggcgctttgtcgagtgctttttgtccagcactcggcaaaaaagtctttgccatgtgccgcactcggcaaagtcctgctctcggtaacgaccgcgtttaccgagagcaggactctcgacacagaaatacactcgacaaagaaatctttgccgagagccaaacactcggcgaacggcagcgctcggcaaagggtcgtcagccgccgtctaaagctgacggtcgttatctttgtcgagtgccccctcgtccgacactcagtagagcaagcttgccgagtgccatccttggacactcgataaagtatattttatttttttttattttgccaaccaaactttttgtggtatgttcctacactatgtagatctacatgtaccattttggcacaattacaaaaatgttttctataactattagatttagttcgtttatttgaatttcttcggaaaattcacatatgaactgcaagtcactcgaaacatgaaaaaccgtgcatgcaaaataaatgatatgcatgttatctagcacaagttacgaccgaattcagaagcagaccagaatcttcaagcaccatgctcactaaacatgaccgtgaacttgttatccagttgtttaaaaattgtataaaacacaaataaagtcagaaattaatgaaacttgtccacatgtcatgatatcatatatagaggttgtgataaaaatttgataatgtttcggtaaagttgtgacgtactatgtgtagaaacctaagtgacctacacataaaatcatagagtttcaatgtagttcactcgacaaagactttgtcaagtgtccgataaaaagtattcagcaaagaagccgttgtcgatttactgttcgtcgagatctctttgccgagtgtcacactaggcaaagtctttacggagtgtttttcaggctttgacactcggcaaagcgctcgattccagtagtgacagtaatttgcatcaaaaatagccgagagatttaaaatgagtcaactaatagaccaactaattattagctattagtcgttagcttctttaatctaagctaaaaccaactaatagcttatttgttgaattacaattagctcaacggaattctctgttttttctataaaaaaaagggaaactgcccctcatttacagcaaactgtccgctgcctgtcgtccagatacaatgaacgtacctagtaggaactcttttacacgctcggtcgctcgccgcggatcggagtcccaggaacacgacaccactgtggaacacgacaaagtctgctcagaggcggccacaccctggcgtgcaccgagccggagcccggataagcacggtaaggagagtacggcgggacgtggcgacccgtgtgtctgctgccacgcagccttcctccacgtagccgcgcggccgcgccacgtaccagggcccggcgctggtataaatgcgcgccacctccgctttagttctgcatacagccaacccaacacacacccgagcatatcacagtgacagacactacacgggatcctaaaccatgcgcgtgctgctcgtggccctggccctgctggctcttgctgccagcgccacctctgcccagagcgagccggagctgaagctggagagcgtggtgatcgtgagcaggcacggcgtgagggccccgaccaagttcacccagctgatgcaggacgtgaccccggacgcgttctacacctggccggtgaagctgggcgagctgaccccgaggggcggcgagctgatcgcctacctgggccactactggaggcagaggctggtggccgacggcctgctgccgaagaagggctgcccgcagagcggccaggtggccatcatcgccgacgtggacgagaggaccaggaagaccggtgaggccttcgccgccggcctggccccggactgcgccatcaccgtgcacacccaggccgacaccagcagcccggacccgctgttcaacccgctgaagaccggcgtgtgccagctggacgtggcccaggtgaccgacgccatcctggagagggccggcggcagcatcgccgacttcaccggccactaccagaccgccttcagggagctggagagggtgctgaacttcccgcagagcaacctggccctgaagagggagaagcaggacgagagcgccagcctgacccaggccctgccgagcgagctgaaggtgagcgccgacaacgtgagcctgaccggcgcctggagcctggccagcatgctgaccgagattttcctgctgcagcaggcccagggcatgccggagccgggctggggcaggatcaccgacagccaccagtggaacaccctgctgagcctgcacaacgcccagttcgacctgctgcagaggaccccggaggtggccaggagcagggccaccccgctgctggacctgatcaagaccgccctgaccccgcacccgccgcagaagcaggcctacggcgtgaccctgccgaccagcgtgctgttcatcgccggccacgacaccaacctggccaacctgggcggcgccctcgagctgcagtggaccctgccgggccagccggacaacaccccgccgggcggcgagctggtgttcgagaggtggaggaggctgagcgacaacagccagtggattcaggtgagcctggtgttccagaccctgcagcagatgagggacaagaccccgctgttcctgaacaccccgccgggcgaggtgaagctgaccctggccggctgcgaggagaggaacgcccagggcatgtgcagcctggccggcttcacccagatcgtgaacgaggccaggattccggcctgcagcctgagcgagaaggacgagctgtgacctaggtccccgaatttccccgatcgttcaaacatttggcaataaagtttcttaagattgaatcctgttgccggtcttgcgatgattatcatataatttctgttgaattacgttaagcatgtaataattaacatgtaatgcatgacgttatttatgagatgggtttttatgattagagtcccgcaattatacatttaatacgcgatagaaaacaaaatatagcgcgcaaactaggataaattatcgcgcgcggtgtcatctatgttactagatcgggaattggaattcctgcagtgcagcgtgacccggtcgtgcccctctctagagataatgagcattgcatgtctaagttataaaaaattaccacatattttttttgtcacacttgtttgaagtgcagtttatctatctttatacatatatttaaactttactctacgaataatataatctatagtactacaataatatcagtgttttagagaatcatataaatgaacagttagacatggtctaaaggacaattgagtattttgacaacaggactctacagttttatctttttagtgtgcatgtgttctcctttttttttgcaaatagcttcacctatataatacttcatccattttattagtacatccatttagggtttagggttaatggtttttatagactaatttttttagtacatctattttattctattttagcctctaaattaagaaaactaaaactctattttagtttttttatttaataatttagatataaaatagaataaaataaagtgactaaaaattaaacaaataccctttaagaaattaaaaaaactaaggaaacatttttcttgtttcgagtagataatgccagcctgttaaacgccgtcgacgagtctaacggacaccaaccagcgaaccagcagcgtcgcgtcgggccaagcgaagcagacggcacggcatctctgtcgctgcctctggacccctctcgagagttccgctccaccgttggacttgctccgctgtcggcatccagaaattgcgtggcggagcggcagacgtgagccggcacggcaggcggcctcctcctcctctcacggcacggcagctacgggggattcctttcccaccgctccttcgctttcccttcctcgcccgccgtaataaatagacaccccctccacaccctctttccccaacctcgtgttgttcggagcgcacacacacacaaccagatctcccccaaatccacccgtcggcacctccgcttcaaggtacgccgctcgtcctccccccccccccctctctaccttctctagatcggcgttccggtccatggttagggcccggtagttctacttctgttcatgtttgtgttagatccgtgtttgtgttagatccgtgctgctagcgttcgtacacggatgcgacctgtacgtcagacacgttctgattgctaacttgccagtgtttctctttggggaatcctgggatggctctagccgttccgcagacgggatcgatttcatgattttttttgtttcgttgcatagggtttggtttgcccttttcctttatttcaatatatgccgtgcacttgtttgtcgggtcatcttttcatgcttttttttgtcttggttgtgatgatgtggtctggttgggcggtcgttctagatcggagtagaattctgtttcaaactacctggtggatttattaattttggatctgtatgtgtgtgccatacatattcatagttacgaattgaagatgatggatggaaatatcgatctaggataggtatacatgttgatgcgggttttactgatgcatatacagagatgctttttgttcgcttggttgtgatgatgtggtgtggttgggcggtcgttcattcgttctagatcggagtagaatactgtttcaaactacctggtgtatttattaattttggaactgtatgtgtgtgtcatacatcttcatagttacgagtttaagatggatggaaatatcgatctaggataggtatacatgttgatgtgggttttactgatgcatatacatgatggcatatgcagcatctattcatatgctctaaccttgagtacctatctattataataaacaagtatgttttataattattttgatcttgatatacttggatgatggcatatgcagcagctatatgtggatttttttagccctgccttcatacgctatttatttgcttggtactgtttcttttgtcgatgctcaccctgttgtttggtgttacttctgcagatgcagaaactcattaactcagtgcaaaactatgcctggggcagcaaaacggcgttgactgaactttatggtatggaaaatccgtccagccagccgatggccgagctgtggatgggcgcacatccgaaaagcagttcacgagtgcagaatgccgccggagatatcgtttcactgcgtgatgtgattgagagtgataaatcgactctgctcggagaggccgttgccaaacgctttggcgaactgcctttcctgttcaaagtattatgcgcagcacagccactctccattcaggttcatccaaacaaacacaattctgaaatcggttttgccaaagaaaatgccgcaggtatcccgatggatgccgccgagcgtaactataaagatcctaaccacaagccggagctggtttttgcgctgacgcctttccttgcgatgaacgcgtttcgtgaattttccgagattgtctccctactccagccggtcgcaggtgcacatccggcgattgctcactttttacaacagcctgatgccgaacgtttaagcgaactgttcgccagcctgttgaatatgcagggtgaagaaaaatcccgcgcgctggcgattttaaaatcggccctcgatagccagcagggtgaaccgtggcaaacgattcgtttaatttctgaattttacccggaagacagcggtctgttctccccgctattgctgaatgtggtgaaattgaaccctggcgaagcgatgttcctgttcgctgaaacaccgcacgcttacctgcaaggcgtggcgctggaagtgatggcaaactccgataacgtgctgcgtgcgggtctgacgcctaaatacattgatattccggaactggttgccaatgtgaaattcgaagccaaaccggctaaccagttgttgacccagccggtgaaacaaggtgcagaactggacttcccgattccagtggatgattttgccttctcgctgcatgaccttagtgataaagaaaccaccattagccagcagagtgccgccattttgttctgcgtcgaaggcgatgcaacgttgtggaaaggttctcagcagttacagcttaaaccgggtgaatcagcgtttattgccgccaacgaatcaccggtgactgtcaaaggccacggccgtttagcgcgtgtttacaacaagctgtaagagcttactgaaaaaattaacatctcttgctaagctgggagctctagatccccgaatttccccgatcgttcaaacatttggcaataaagtttcttaagattgaatcctgttgccggtcttgcgatgattatcatataatttctgttgaattacgttaagcatgtaataattaacatgtaatgcatgacgttatttatgagatgggtttttatgattagagtcccgcaattatacatttaatacgcgatagaaaacaaaatatagcgcgcaaactaggataaattatcgcgcgcggtgtcatctatgttactagatcgggaattggcgagctcgaattaattcagtacattaaaaacgtccgcaatgtgttattaagttgtctaagcgtcaatttgtttacaccacaatatatcct

SEQ ID NO: 153 - DNA, 8439 bp, Artificial Sequence
  Synthetic construct, Locus_3507_T-DNA
aacactgatagtttaaactgaaggcgggaaacgacaacctgatcatgagcggagaattaagggagtcacgttatgacccccgccgatgacgcgggacaagccgttttacgtttggaactgacagaaccgcaacgttgaaggagccactcagcctaagcggccgcattggacttaattaagtgaggccggccaagcgtcgatttaaatgtaccacatggcgcgccaactatcatgcgatcgcttcatgtctaactcgagttactggtacgtaccaaatccatggaatcaaggtacctccatgctgtcctactacttgcttcatccccttctacattttgttctggtttttggcctgcatttcggatcatgatgtatgtgatttccaatctgctgcaatatgaatggagactctgtgctaaccatcaacaacatgaaatgcttatgaggcctttgctgagcagccaatcttgcctgtgtttatgtcttcacaggccgaattcctctgttttgtttttcaccctcaatatttggaaacatttatctaggttgtttgtgtccaggcctataaatcatacatgatgttgtcgtattggatgtgaatgtggtggcgtgttcagtgccttggatttgagtttgatgagagttgcttctgggtcaccactcaccattatcgatgctcctcttcagcataaggtaaaagtcttccctgtttacgttattttacccactatggttgcttgggttggttttttcctgattgcttatgccatggaaagtcatttgatatgttgaacttgaattaactgtagaattgtatacatgttccatttgtgttgtacttccttcttttctattagtagcctcagatgagtgtgaaaaaaacagattatataacttgccctataaatcatttgaaaaaaatattgtacagtgagaaattgatatatagtgaatttttaagagcatgttttcctaaagaagtatatattttctatgtacaaaggccattgaagtaattgtagatacaggataatgtagactttttggacttacactgctacctttaagtaacaatcatgagcaatagtgttgcaatgatatttaggctgcattcgtttactctcttgatttccatgagcacgcttcccaaactgttaaactctgtgttttttgccaaaaaaaaatgcataggaaagttgcttttaaaaaatcatatcaatccattttttaagttatagctaatacttaattaatcatgcgctaataagtcactctgtttttcgtactagagagattgttttgaaccagcactcaagaacacagccttaacccagccaaataatgctacaacctaccagtccacacctcttgtaaagcatttgttgcatggaaaagctaagatgacagcaacctgttcaggaaaacaactgacaaggtcatagggagagggagcttttggaaaggtgccgtgcagttcaaacaattagttagcagtagggtgttggtttttgctcacagcaataagaagttaatcatggtgtaggcaacccaaataaaacaccaaaatatgcacaaggcagtttgttgtattctgtagtacagacaaaactaaaagtaatgaaagaagatgtggtgttagaaaaggaaacaatatcatgagtaatgtgtgggcattatgggaccacgaaataaaaagaacattttgatgagtcgtgtatcctcgatgagcctcaaaagttctctcaccccggataagaaacccttaagcaatgtgcaaagtttgcattctccactgacataatgcaaaataagatatcatcgatgacatagcaactcatgcatcatatcatgcctctctcaacctattcattcctactcatctacataagtatcttcagctaaatgttagaacataaacccataagtcacgtttgatgagtattaggcgtgacacatgacaaatcacagactcaagcaagataaagcaaaatgatgtgtacataaaactccagagctatatgtcatattgcaaaaagaggagagcttataagacaaggcatgactcacaaaaattcatttgcctttcgtgtcaaaaagaggagggctttacattatccatgtcatattgcaaaagaaagagagaaagaacaacacaatgctgcgtcaattatacatatctgtatgtccatcattattcatccacctttcgtgtaccacacttcatatatcatgagtcacttcatgtctggacattaacaaactctatcttaacatttagatgcaagagcctttatctcactataaatgcacgatgatttctcattgtttctcacaaaaagcattcagttcattagtcctacaacaacggatcctaaaccatgcgcgtgctgctcgtggccctggccctgctggctcttgctgccagcgccacctctgcccagagcgagccggagctgaagctggagagcgtggtgatcgtgagcaggcacggcgtgagggccccgaccaagttcacccagctgatgcaggacgtgaccccggacgcgttctacacctggccggtgaagctgggcgagctgaccccgaggggcggcgagctgatcgcctacctgggccactactggaggcagaggctggtggccgacggcctgctgccgaagaagggctgcccgcagagcggccaggtggccatcatcgccgacgtggacgagaggaccaggaagaccggtgaggccttcgccgccggcctggccccggactgcgccatcaccgtgcacacccaggccgacaccagcagcccggacccgctgttcaacccgctgaagaccggcgtgtgccagctggacgtggcccaggtgaccgacgccatcctggagagggccggcggcagcatcgccgacttcaccggccactaccagaccgccttcagggagctggagagggtgctgaacttcccgcagagcaacctggccctgaagagggagaagcaggacgagagcgccagcctgacccaggccctgccgagcgagctgaaggtgagcgccgacaacgtgagcctgaccggcgcctggagcctggccagcatgctgaccgagattttcctgctgcagcaggcccagggcatgccggagccgggctggggcaggatcaccgacagccaccagtggaacaccctgctgagcctgcacaacgcccagttcgacctgctgcagaggaccccggaggtggccaggagcagggccaccccgctgctggacctgatcaagaccgccctgaccccgcacccgccgcagaagcaggcctacggcgtgaccctgccgaccagcgtgctgttcatcgccggccacgacaccaacctggccaacctgggcggcgccctcgagctgcagtggaccctgccgggccagccggacaacaccccgccgggcggcgagctggtgttcgagaggtggaggaggctgagcgacaacagccagtggattcaggtgagcctggtgttccagaccctgcagcagatgagggacaagaccccgctgttcctgaacaccccgccgggcgaggtgaagctgaccctggccggctgcgaggagaggaacgcccagggcatgtgcagcctggccggcttcacccagatcgtgaacgaggccaggattccggcctgcagcctgagcgagaaggacgagctgtgacctaggtccccgaatttccccgatcgttcaaacatttggcaataaagtttcttaagattgaatcctgttgccggtcttgcgatgattatcatataatttctgttgaattacgttaagcatgtaataattaacatgtaatgcatgacgttatttatgagatgggtttttatgattagagtcccgcaattatacatttaatacgcgatagaaaacaaaatatagcgcgcaaactaggataaattatcgcgcgcggtgtcatctatgttactagatcgggaattgggtaccaaagtaatcatattattttatgtgtgaatcttctttactttttcatttgattatgattatgaaggtatgaccttcataaccttcgtccgaaatccattatatccaaaggaaaataatgcttcgaaggacgaaggattttgatatttaacattttatgttgccttgttcttaattcatagcatttgagaacaagtccccaacaccaatctttatctttactatattaaagcaccagttcaacgatcgtctcgtgtcaatattattaaaaaactcctacatttctttataatcaacccgcactcttataatctcttctcttactactataataagagagtttatgtacaaaataaggtgaaattatgtataagtgttctggaccttggttgttggctcatattcacacaacctaatcaatagaaaacatatgttttattaaaacaaaatttatcatatatatatatatatatatatatatatatatatatatatataatataaaccgtagcaatgcacaggcatatgactagtggcaacttaataccatgtgtgtattaagatgaataagaggtatccaaataaataacttgttcgcttacgtctggatcgaaaggggttggaaacgattaaatctcttcctagtcaaaattaaatagaaggagatttaatcgatttctcccaatccccttcgatccaggtgcaaccgaataagtccttaaatgttgaggaacacgaaacaaccatgcattggcatgtaaagctccaagaattcgttgtatccttaacaactcacagaacatcaaccaaaattgcacgtcaagggtattgggtaagaaacaatcaaacaaatcctctctgtgtgcaaagaaacacggtgagtcatgccgagatcatactcatctgatatacatgcttacagctcacaagacattacaaacaactcatattgcattacaaagatcgtttcatgaaaaataaaataggccggaacaggacaaaaatccttgacgtgtaaagtaaatttacaacaaaaaaaaagccatatgtcaagctaaatctaattcgttttacgtagatcaacaacctgtagaaggcaacaaaactgagccacgcagaagtacagaatgattccagatgaaccatcgacgtgctacgtaaagagagtgacgagtcatatacatttggcaagaaaccatgaagctgcctacagccgtctcggtggcataagaacacaagaaattgtgttaattaatcaaagctataaataacgctcgcatgcctgtgcacttctccatcaccaccactgggtcttcagaccattagctttatctactccagagcgcagaagaacccgatcgacaccggatcctaaaccatgcgcgtgctgctcgtggccctggccctgctggctcttgctgccagcgccacctctgcccagagcgagccggagctgaagctggagagcgtggtgatcgtgagcaggcacggcgtgagggccccgaccaagttcacccagctgatgcaggacgtgaccccggacgcgttctacacctggccggtgaagctgggcgagctgaccccgaggggcggcgagctgatcgcctacctgggccactactggaggcagaggctggtggccgacggcctgctgccgaagaagggctgcccgcagagcggccaggtggccatcatcgccgacgtggacgagaggaccaggaagaccggtgaggccttcgccgccggcctggccccggactgcgccatcaccgtgcacacccaggccgacaccagcagcccggacccgctgttcaacccgctgaagaccggcgtgtgccagctggacgtggcccaggtgaccgacgccatcctggagagggccggcggcagcatcgccgacttcaccggccactaccagaccgccttcagggagctggagagggtgctgaacttcccgcagagcaacctggccctgaagagggagaagcaggacgagagcgccagcctgacccaggccctgccgagcgagctgaaggtgagcgccgacaacgtgagcctgaccggcgcctggagcctggccagcatgctgaccgagattttcctgctgcagcaggcccagggcatgccggagccgggctggggcaggatcaccgacagccaccagtggaacaccctgctgagcctgcacaacgcccagttcgacctgctgcagaggaccccggaggtggccaggagcagggccaccccgctgctggacctgatcaagaccgccctgaccccgcacccgccgcagaagcaggcctacggcgtgaccctgccgaccagcgtgctgttcatcgccggccacgacaccaacctggccaacctgggcggcgccctcgagctgcagtggaccctgccgggccagccggacaacaccccgccgggcggcgagctggtgttcgagaggtggaggaggctgagcgacaacagccagtggattcaggtgagcctggtgttccagaccctgcagcagatgagggacaagaccccgctgttcctgaacaccccgccgggcgaggtgaagctgaccctggccggctgcgaggagaggaacgcccagggcatgtgcagcctggccggcttcacccagatcgtgaacgaggccaggattccggcctgcagcctgagcgagaaggacgagctgtgacctaggtccccgaatttccccgatcgttcaaacatttggcaataaagtttcttaagattgaatcctgttgccggtcttgcgatgattatcatataatttctgttgaattacgttaagcatgtaataattaacatgtaatgcatgacgttatttatgagatgggtttttatgattagagtcccgcaattatacatttaatacgcgatagaaaacaaaatatagcgcgcaaactaggataaattatcgcgcgcggtgtcatctatgttactagatcgggaattgggtacccggtatgaatttggaaacaaattcagtacttttaaaaaaatttgttgtagggagcaaataatacataaaataatttatgcattattttattttttatttgtaataatatgcttgaaacgataattcagtatgcatgttgtgccagtgtactacacgggcggggggaggggattgagtgggccagcgcggtgcgtagggtagatgggctgaaattgataactcaagtccgactaggttctctttttatttcccttccttttctattttcctttcttttaattttcatgctttcaaactaaattcaaattcgagttttgaatttcagcttctaaattgtacactaaaattatatgataaggtaacccctactattacttttaatttttttattctaccccatattgtttacttaggggagaataattgacttaatcacattcttccttaggtttcaattctcaatctttcaaatccacatttttagatttctattttgaatttaaataccagtttggatttagagttcaatttcaaaatacacaaccaaaataccagcatgaatgcaaatatattttatgtttatgtatttacttttcttttatactttgctcaaaatagttattttcatgtatgaaactcaataagcaaggaactcacgttattatataacctaataggaataatttaggtaacataatttatcatcctcttgatttaaaagagatatgcctccagaataagacacatactaaaaataactctaatattgaataactaaagtcgtacaaatctctactattattcctataaaataataaagaactagctacaacttctttaaggcattattcagggtttacagcttgagaggcatgaacccatcctgtatactcctggacttggaagacaaaatgtcaaccaaagtgaaaggttttcttatggttgctgctaagagatagattgaacactagatctctactaagacgtcagggcatgcgtttagactcctacacatgcgaaaactgcatcttacagttggaagaaactatatctcaccacttcctgcggtgtaactttgcccaaagatgttggctcactgttggaatcactccgccccgaactttggatctaacgcttgcagtgctacatattagagcaagactaacaatgccgtggagaatggaaggtattataaccatgtcatggtgcatatggaaatgtcgaaataactggatattcgaaaacataccgccaacggtggcggcctgcaaggaaatgttcaagactgaaatgaactacatctgctaccaagttaagctcgagacaggagctaaaagtagaaactggatacaacactttgtaacatagtgacactccccttttcctttcttttaccttagaactatacatacaatccacattcaataaaaatttgtaggtacgccatacacactaccggaatccggctctttgccgagtgtgaggcgc

SEQ ID NO: 154 - DNA, 13592 bp, Artificial Sequence
  Synthetic construct, Locus PY_209
gcaagtccaggacacagacaaagactagaaagaacggcactcgtgtgcctgactgatgcgccacgccagcgaacacatgtcacttgtacactactgcgtgataaaagctgagagccggagacatcaggtataccaatatcagcaagatgccatcgctgatgacacaaaggggcatggcagatcagcaagacaagaagattgtaccatatgtttagcgttgttgtccgtcatgatttcgataaaaagtacgagcaggtgttgtgtgtgagcgatcagccttctaataacaacagagtaggtggcgagatgtatggaggtggagagtgtgcacctccatacgtgacgtcagcgtccatataaaaggcaagtgcacgacaattgatgaatccgcaagcttttcagaaagcactggtgtacagtacaaggccatacgactaccggatttgatgtaatttacttatatagtgtttggttgaggagcagccaagtataacggaaccattccatccctcattctaagaacggaaccgctctgttctatgtttgataatctggaacagaaccgctctgttctgtgtttagttgcagagtgaacggaacagaacgtgactgtgagaacaggataggaacggagcggctccgtccgattgattttttgaagcggaatggttccaaatctgaggagaatattccctaattaaaaccattccgttctagttactttgtaactaaacagcaacaaaactgagacagaacagctctgttctacttgactcttcaaccaaacactaccttagactgccggattcggcgtaatttactggttcgagggatggcttcaaccggagcagctccaccgcgctctaaaatttggcctgcatatagacacaatctaattttttctctctcgctacattgaatcgagctagcctaggaatgacatgcagccaaaatttaatacgcctcatctgaaataaaaagaacatagaggcagcagcatcagtggcagtgctaaaccgcagctgcccgagcaccagctacagctatagctacgaaatcgtaaagccggttacatttggcagaacccagatgtctggaccaaaccgtctcggccgctaagtgcgtaccgctggtgctggtgcgccgcagccgccgaaccgagcggttccgctgaacaggtgtacgccctacctggatcccttcctctatgtacaatgccgctggaagagtagtccgagacgaagcctgtgctctccgagaagtaccttgtctgtgggttggaaggcgaggagagcctcgtgcacgcggcgaaactgccaggtggaccgggatgatgctccggggcatagcttggcccaaatatcgaggagattgggtccaggccagcgttgtcgccgtagtccacgacgctgaacgagtccctcgtgctctcggtggtgaatgaggactcgtccgagctggtaaacagcgaccattcgcttgacgtggcctccgagaagtccgcgctaaccgagtctgcgaaggcatcgtcggcgcgatggaattccctggatctcaactctgcttgctgatcttgcgtgtagccctcgccatcgggtctaaagtcataaacaccgtatgctggatcgttcgccgagaggagtaactctgtctgctcgcgctcgtgtttagagcccttggaatactttgatgtgtggcgcttcgcggatggaacagtcggccccttctcgatgtatattcttggtggtcgggggaaagacctgaatggtatttttacgaatatgagatcgctgcagagtgcaggcacagatactccatatgcaacttaggtacagcaaattatatgtttcaaacactgatagtttaaactgaaggcgggaaacgacaacctgatcatgagcggagaattaagggagtcacgttatgacccccgccgatgacgcgggacaagccgttttacgtttggaactgacagaaccgcaacgttgaaggagccactcagcttaattaagtctaactcgagttactggtacgtatacagggttccttgcgtgaagaagggtggcctgcggttcaccattaacggtcacgactacttccagctagtactggtgaccaacgtcgcggcggcagggtcaatcaagtccatggaggttatgggttccaacacagcggattggatgccgatggcacgtaactggggcgcccaatggcactcactggcctacctcaccggtcaaggtctatcctttagggtcaccaacacagatgaccaaacgctcgtcttcaccaacgtcgtgccaccaggatggaagtttggccagacatttgcaagcaagctgcagttcaagtgagaggagaagcctgaattgataccggagcgtttcttttgggagtaacatctctggttgcctagcaaacatatgattgtatataagtttcgttgtgcgtttattctttcggtgtgtaaaataacatacatgctttcctgatattttcttgtatatatgtacacacacacgacaaatccttccatttctattattattgaacaatttaattgcgagggcgagtacttgtctgtttaccttttttttttcagatggcattttatagtttaacctttcatggaccggcagtagttctaaccatgaatgaaaagaaatcatagtccacaccacgcagggacattgtggtcattttagacaagacgatttgattaatgtcttgtatgatatggtcgacagtgaggactaacaaacatatggcatattttattaccggcgagttaaataaatttatgtcacagtaataaactgcctaataaatgcacgccagaaaatataatgataaaaaaaagaaaagatacataagtccattgcttctacttttttaaaaattaaatccaacattttctattttttggtataaacttggaagtactagttggatatgcaaaatcatctaacctccatatatttcatcaatttgtttactttacatatgggagaggatagtatgtcaaagaaaatgacaacaagcttacaagtttcttattttaaaagttccgctaacttatcaagcatagtgtgccacgcaaaactgacaacaaaccaacaaatttaaggagcgcctaacttatcatctatgacataccgcacaaaatgataacatactagagaaactttattgcacaaaaggaaatttatccataaggcaaaggaacatcttaaggctttggatatacatttaccaacaagcattgtttgtattacccctaaagcgcaagacatgtcatccatgagtcatagtgtgtatatctcaacattgcaaagctaccttttttctattatacttttcgcattataggctagatattatctatacatgtcaacaaactctatccctacgtcatatctgaagattcttttcttcactatataagttggcttccctgtcattgaactcacatcaaccagcccaagtttccaataacatcctcaaatagctggatccaccatgagggtgttgctcgttgccctcgctctcctggctctcgctgcgagcgccaccagcgctgcgcagtccgagccggagctgaagctggagtccgtggtgatcgtgtcgcgccacggggtgcgcgccccgaccaagttcacgcagctcatgcaggacgtgaccccggacgccttctacacctggccggtgaagctcggcgagctgaccccgcgcggcggcgagctgatcgcctacctcggccactactggcgccagcgcctcgtggccgacggcctcctcccgaagaagggctgcccgcagtccggccaggtggcgatcatcgccgacgtggacgagcgcacccgcaagacgggcgaggccttcgccgccggcctcgccccggactgcgccatcaccgtgcacacccaggccgacacctcctccccggacccgctcttcaacccgctcaagaccggcgtgtgccagctcgacgtggcccaggtgaccgacgccatcctggagcgcgccggcggctccatcgccgacttcaccggccactaccagaccgccttccgcgagctggagcgcgtgctcaacttcccgcagtcgaacctcgccctcaagcgcgagaagcaggacgagtccgcctccctcacccaggccctcccgtccgagctgaaggtgtccgccgacaacgtgtccctcaccggcgcctggtccctcgcctccatgctcaccgaaatcttcctcctccagcaggcccagggcatgccggagccgggctggggccgcatcaccgactcccaccagtggaacaccctcctctccctccacaacgcccagttcgacctcctccagcgcaccccggaggtggcccgctcccgcgccaccccgctcctcgacctcatcaagaccgccctcaccccgcacccgccgcagaagcaggcctacggcgtgaccctcccgacctcggtgctcttcatcgccggccacgacaccaacctcgccaacctcggcggcgccctggagctgcagtggaccctcccgggccagccggacaacaccccgccgggcggcgagctggtgttcgagcgctggcgccgcctctccgacaactcccagtggattcaggtgtccctcgtgttccagaccctccagcagatgcgcgacaagaccccgctcttcctcaacaccccgccgggcgaggtgaagctcaccctggccggctgcgaggagcgcaacgcgcagggcatgtgctccctcgccggcttcacccagatcgtgaacgaggcccgcatcccggcctgctccctctccgagaaggacgagctgtaacctaggtccccgaatttccccgatcgttcaaacatttggcaataaagtttcttaagattgaatcctgttgccggtcttgcgatgattatcatataatttctgttgaattacgttaagcatgtaataattaacatgtaatgcatgacgttatttatgagatgggtttttatgattagagtcccgcaattatacatttaatacgcgatagaaaacaaaatatagcgcgcaaactaggataaattatcgcgcgcggtgtcatctatgttactagatcgggaattgttaattaagtctaactcgagttactggtacgtatacagggttccttgcgtgaagaagggtggcctgcggttcaccattaacggtcacgactacttccagctagtactggtgaccaacgtcgcggcggcagggtcaatcaagtccatggaggttatgggttccaacacagcggattggatgccgatggcacgtaactggggcgcccaatggcactcactggcctacctcaccggtcaaggtctatcctttagggtcaccaacacagatgaccaaacgctcgtcttcaccaacgtcgtgccaccaggatggaagtttggccagacatttgcaagcaagctgcagttcaagtgagaggagaagcctgaattgataccggagcgtttcttttgggagtaacatctctggttgcctagcaaacatatgattgtatataagtttcgttgtgcgtttattctttcggtgtgtaaaataacatacatgctttcctgatattttcttgtatatatgtacacacacacgacaaatccttccatttctattattattgaacaatttaattgcgagggcgagtacttgtctgtttaccttttttttttcagatggcattttatagtttaacctttcatggaccggcagtagttctaaccatgaatgaaaagaaatcatagtccacaccacgcagggacattgtggtcattttagacaagacgatttgattaatgtcttgtatgatatggtcgacagtgaggactaacaaacatatggcatattttattaccggcgagttaaataaatttatgtcacagtaataaactgcctaataaatgcacgccagaaaatataatgataaaaaaaagaaaagatacataagtccattgcttctacttttttaaaaattaaatccaacattttctattttttggtataaacttggaagtactagttggatatgcaaaatcatctaacctccatatatttcatcaatttgtttactttacatatgggagaggatagtatgtcaaagaaaatgacaacaagcttacaagtttcttattttaaaagttccgctaacttatcaagcatagtgtgccacgcaaaactgacaacaaaccaacaaatttaaggagcgcctaacttatcatctatgacataccgcacaaaatgataacatactagagaaactttattgcacaaaaggaaatttatccataaggcaaaggaacatcttaaggctttggatatacatttaccaacaagcattgtttgtattacccctaaagcgcaagacatgtcatccatgagtcatagtgtgtatatctcaacattgcaaagctaccttttttctattatacttttcgcattataggctagatattatctatacatgtcaacaaactctatccctacgtcatatctgaagattcttttcttcactatataagttggcttccctgtcattgaactcacatcaaccagcccaagtttccaataacatcctcaaatagctggatccaccatgagggtgttgctcgttgccctcgctctcctggctctcgctgcgagcgccaccagcgctgcgcagtccgagccggagctgaagctggagtccgtggtgatcgtgtcgcgccacggggtgcgcgccccgaccaagttcacgcagctcatgcaggacgtgaccccggacgccttctacacctggccggtgaagctcggcgagctgaccccgcgcggcggcgagctgatcgcctacctcggccactactggcgccagcgcctcgtggccgacggcctcctcccgaagaagggctgcccgcagtccggccaggtggcgatcatcgccgacgtggacgagcgcacccgcaagacgggcgaggccttcgccgccggcctcgccccggactgcgccatcaccgtgcacacccaggccgacacctcctccccggacccgctcttcaacccgctcaagaccggcgtgtgccagctcgacgtggcccaggtgaccgacgccatcctggagcgcgccggcggctccatcgccgacttcaccggccactaccagaccgccttccgcgagctggagcgcgtgctcaacttcccgcagtcgaacctcgccctcaagcgcgagaagcaggacgagtccgcctccctcacccaggccctcccgtccgagctgaaggtgtccgccgacaacgtgtccctcaccggcgcctggtccctcgcctccatgctcaccgaaatcttcctcctccagcaggcccagggcatgccggagccgggctggggccgcatcaccgactcccaccagtggaacaccctcctctccctccacaacgcccagttcgacctcctccagcgcaccccggaggtggcccgctcccgcgccaccccgctcctcgacctcatcaagaccgccctcaccccgcacccgccgcagaagcaggcctacggcgtgaccctcccgacctcggtgctcttcatcgccggccacgacaccaacctcgccaacctcggcggcgccctggagctgcagtggaccctcccgggccagccggacaacaccccgccgggcggcgagctggtgttcgagcgctggcgccgcctctccgacaactcccagtggattcaggtgtccctcgtgttccagaccctccagcagatgcgcgacaagaccccgctcttcctcaacaccccgccgggcgaggtgaagctcaccctggccggctgcgaggagcgcaacgcgcagggcatgtgctccctcgccggcttcacccagatcgtgaacgaggcccgcatcccggcctgctccctctccgagaaggacgagctgtaacctaggtccccgaatttccccgatcgttcaaacatttggcaataaagtttcttaagattgaatcctgttgccggtcttgcgatgattatcatataatttctgttgaattacgttaagcatgtaataattaacatgtaatgcatgacgttatttatgagatgggtttttatgattagagtcccgcaattatacatttaatacgcgatagaaaacaaaatatagcgcgcaaactaggataaattatcgcgcgcggtgtcatctatgttactagatcgggaattggaattcctgcagtgcagcgtgacccggtcgtgcccctctctagagataatgagcattgcatgtctaagttataaaaaattaccacatattttttttgtcacacttgtttgaagtgcagtttatctatctttatacatatatttaaactttactctacgaataatataatctatagtactacaataatatcagtgttttagagaatcatataaatgaacagttagacatggtctaaaggacaattgagtattttgacaacaggactctacagttttatctttttagtgtgcatgtgttctcctttttttttgcaaatagcttcacctatataatacttcatccattttattagtacatccatttagggtttagggttaatggtttttatagactaatttttttagtacatctattttattctattttagcctctaaattaagaaaactaaaactctattttagtttttttatttaataatttagatataaaatagaataaaataaagtgactaaaaattaaacaaataccctttaagaaattaaaaaaactaaggaaacatttttcttgtttcgagtagataatgccagcctgttaaacgccgtcgacgagtctaacggacaccaaccagcgaaccagcagcgtcgcgtcgggccaagcgaagcagacggcacggcatctctgtcgctgcctctggacccctctcgagagttccgctccaccgttggacttgctccgctgtcggcatccagaaattgcgtggcggagcggcagacgtgagccggcacggcaggcggcctcctcctcctctcacggcacggcagctacgggggattcctttcccaccgctccttcgctttcccttcctcgcccgccgtaataaatagacaccccctccacaccctctttccccaacctcgtgttgttcggagcgcacacacacacaaccagatctcccccaaatccacccgtcggcacctccgcttcaaggtacgccgctcgtcctccccccccccccctctctaccttctctagatcggcgttccggtccatggttagggcccggtagttctacttctgttcatgtttgtgttagatccgtgtttgtgttagatccgtgctgctagcgttcgtacacggatgcgacctgtacgtcagacacgttctgattgctaacttgccagtgtttctctttggggaatcctgggatggctctagccgttccgcagacgggatcgatttcatgattttttttgtttcgttgcatagggtttggtttgcccttttcctttatttcaatatatgccgtgcacttgtttgtcgggtcatcttttcatgcttttttttgtcttggttgtgatgatgtggtctggttgggcggtcgttctagatcggagtagaattctgtttcaaactacctggtggatttattaattttggatctgtatgtgtgtgccatacatattcatagttacgaattgaagatgatggatggaaatatcgatctaggataggtatacatgttgatgcgggttttactgatgcatatacagagatgctttttgttcgcttggttgtgatgatgtggtgtggttgggcggtcgttcattcgttctagatcggagtagaatactgtttcaaactacctggtgtatttattaattttggaactgtatgtgtgtgtcatacatcttcatagttacgagtttaagatggatggaaatatcgatctaggataggtatacatgttgatgtgggttttactgatgcatatacatgatggcatatgcagcatctattcatatgctctaaccttgagtacctatctattataataaacaagtatgttttataattattttgatcttgatatacttggatgatggcatatgcagcagctatatgtggatttttttagccctgccttcatacgctatttatttgcttggtactgtttcttttgtcgatgctcaccctgttgtttggtgttacttctgcagatccagatctaaaccatgcagaaactcattaactcagtgcaaaactatgcctggggcagcaaaacggcgttgactgaactttatggtatggaaaatccgtccagccagccgatggccgagctgtggatgggcgcacatccgaaaagcagttcacgagtgcagaatgccgccggagatatcgtttcactgcgtgatgtgattgagagtgataaatcgactctgctcggagaggccgttgccaaacgctttggcgaactgcctttcctgttcaaagtattatgcgcagcacagccactctccattcaggttcatccaaacaaacacaattctgaaatcggttttgccaaagaaaatgccgcaggtatcccgatggatgccgccgagcgtaactataaagatcctaaccacaagccggagctggtttttgcgctgacgcctttccttgcgatgaacgcgtttcgtgaattttccgagattgtctccctactccagccggtcgcaggtgcacatccggcgattgctcactttttacaacagcctgatgccgaacgtttaagcgaactgttcgccagcctgttgaatatgcagggtgaagaaaaatcccgcgcgctggcgattttaaaatcggccctcgatagccagcagggtgaaccgtggcaaacgattcgtttaatttctgaattttacccggaagacagcggtctgttctccccgctattgctgaatgtggtgaaattgaaccctggcgaagcgatgttcctgttcgctgaaacaccgcacgcttacctgcaaggcgtggcgctggaagtgatggcaaactccgataacgtgctgcgtgcgggtctgacgcctaaatacattgatattccggaactggttgccaatgtgaaattcgaagccaaaccggctaaccagttgttgacccagccggtgaaacaaggtgcagaactggacttcccgattccagtggatgattttgccttctcgctgcatgaccttagtgataaagaaaccaccattagccagcagagtgccgccattttgttctgcgtcgaaggcgatgcaacgttgtggaaaggttctcagcagttacagcttaaaccgggtgaatcagcgtttattgccgccaacgaatcaccggtgactgtcaaaggccacggccgtttagcgcgtgtttacaacaagctgtaagagcttactgaaaaaattaacatctcttgctaagctgggagctctagatccccgaatttccccgatcgttcaaacatttggcaataaagtttcttaagattgaatcctgttgccggtcttgcgatgattatcatataatttctgttgaattacgttaagcatgtaataattaacatgtaatgcatgacgttatttatgagatgggtttttatgattagagtcccgcaattatacatttaatacgcgatagaaaacaaaatatagcgcgcaaactaggataaattatcgcgcgcggtgtcatctatgttactagatcgggaattggcgagctcgaattaattcagtacattaaaaacgtccgcaatgtgttattaagttgtctaagcgtcaatttgtttacctcatgtagaaaagcatatatgcaccttctgacataacttgattcactgatacaacctggacctacatatggaacaacataaatcaccacaagatatcataaactctcgagttttttttcctttcctatttcatttcaatgagcctataaacctacaaggaaaagcacatacatatgtgcaccaaagaagtttgacaacaaaactgcatcaaggaagacagcattgacgatcaaaactgcccatgggaacgttcactatccttacactagagtttaaatctagaaacacaatgtcacgaaaccatagtaatttctcgcaattcatacattaggtgataaggtaagacattcttagcctacttaactggagtaggccttgttgtaaaacgtacctctgaatcatcaattctcaaccatgtaccctgcatatctttgacatatgatatatagtgcccagagaatgatgcattttctgtatccacatgtacaaccacggcatacaagaaataaagagggggattgtcaccagacccagtcacaaaaggaaccatgtccaacatatcagggaaagtaacacatttgttgatcttgccatattttcctgactgaaataataaaataaagttcatttagttcttcatcaagaaacattcaagtggtacaaaactgtcagctcgagcatagaacatgagccatgtgataactgatccaagtcaacaatatggaaatttccccaaacgagcttcattacccgtccctgtttcctagggggcgcgtttggttgccttctccaggctccggggaaatcgagactagatagtataaacagagaacctagttgatagcttcatgctactaaaagcagaccatcaagcttcaagcaaagacaagttgctgaggtgtgacccaggcacccagcaatgactaaccctaagagcaggagttcatcatccccagacctgaattgatggaggtgtgactcagcggtagcaggttatttatccggcagtgcttgactccgctagtgcagggaagaaagccttcagcttcaccttcatgttgacggctgagacaggaaggagaggcagcagcagcagtgggaaaacaggcggtacagcagcagggaaggccagaaaagaggggaagacctgtggtgtcagggatggttgtggcacgaagtcctggtggctggggttgcttctcacaggtcagggccaagcgagtaattgtggaggggtatacaagagaaactcaattgggttggggccaaaacacaactatagaccagtgactttgacctgatgtagcacagttcacaattgccagcccattcatccaacacaactaatcagacaattgatcatgattagccaacggctatcagacaaccagatttctggtcaccctaattgagtccagaaaggaccgttggctaatcagacaaccagatttctggtcaccctaattgagtccagaaaggaccgattagaacaattgatcatgattaatcggatgacttgataattatgtcattcatttcaagttaatattaccaagtaccaacaaatgtgggtctaaaaatgctaatgcatgcttcaaagaattggctgaacattgcaccctgcataaatacttatcagatccaaccggtattacgtgatgaaattcaatacaaaaacaattacctgaaatcttttaagaacaactgttaatatgtttggcacctcatgcacgctcagttgcttcctggctttaacataggcagcacaactgcat

SEQ ID NO: 155 - DNA, 9968 bp, Artificial Sequence
  Syntheic construct, PY_209_T-DNA
tcaaacactgatagtttaaactgaaggcgggaaacgacaacctgatcatgagcggagaattaagggagtcacgttatgacccccgccgatgacgcgggacaagccgttttacgtttggaactgacagaaccgcaacgttgaaggagccactcagcttaattaagtctaactcgagttactggtacgtatacagggttccttgcgtgaagaagggtggcctgcggttcaccattaacggtcacgactacttccagctagtactggtgaccaacgtcgcggcggcagggtcaatcaagtccatggaggttatgggttccaacacagcggattggatgccgatggcacgtaactggggcgcccaatggcactcactggcctacctcaccggtcaaggtctatcctttagggtcaccaacacagatgaccaaacgctcgtcttcaccaacgtcgtgccaccaggatggaagtttggccagacatttgcaagcaagctgcagttcaagtgagaggagaagcctgaattgataccggagcgtttcttttgggagtaacatctctggttgcctagcaaacatatgattgtatataagtttcgttgtgcgtttattctttcggtgtgtaaaataacatacatgctttcctgatattttcttgtatatatgtacacacacacgacaaatccttccatttctattattattgaacaatttaattgcgagggcgagtacttgtctgtttaccttttttttttcagatggcattttatagtttaacctttcatggaccggcagtagttctaaccatgaatgaaaagaaatcatagtccacaccacgcagggacattgtggtcattttagacaagacgatttgattaatgtcttgtatgatatggtcgacagtgaggactaacaaacatatggcatattttattaccggcgagttaaataaatttatgtcacagtaataaactgcctaataaatgcacgccagaaaatataatgataaaaaaaagaaaagatacataagtccattgcttctacttttttaaaaattaaatccaacattttctattttttggtataaacttggaagtactagttggatatgcaaaatcatctaacctccatatatttcatcaatttgtttactttacatatgggagaggatagtatgtcaaagaaaatgacaacaagcttacaagtttcttattttaaaagttccgctaacttatcaagcatagtgtgccacgcaaaactgacaacaaaccaacaaatttaaggagcgcctaacttatcatctatgacataccgcacaaaatgataacatactagagaaactttattgcacaaaaggaaatttatccataaggcaaaggaacatcttaaggctttggatatacatttaccaacaagcattgtttgtattacccctaaagcgcaagacatgtcatccatgagtcatagtgtgtatatctcaacattgcaaagctaccttttttctattatacttttcgcattataggctagatattatctatacatgtcaacaaactctatccctacgtcatatctgaagattcttttcttcactatataagttggcttccctgtcattgaactcacatcaaccagcccaagtttccaataacatcctcaaatagctggatccaccatgagggtgttgctcgttgccctcgctctcctggctctcgctgcgagcgccaccagcgctgcgcagtccgagccggagctgaagctggagtccgtggtgatcgtgtcgcgccacggggtgcgcgccccgaccaagttcacgcagctcatgcaggacgtgaccccggacgccttctacacctggccggtgaagctcggcgagctgaccccgcgcggcggcgagctgatcgcctacctcggccactactggcgccagcgcctcgtggccgacggcctcctcccgaagaagggctgcccgcagtccggccaggtggcgatcatcgccgacgtggacgagcgcacccgcaagacgggcgaggccttcgccgccggcctcgccccggactgcgccatcaccgtgcacacccaggccgacacctcctccccggacccgctcttcaacccgctcaagaccggcgtgtgccagctcgacgtggcccaggtgaccgacgccatcctggagcgcgccggcggctccatcgccgacttcaccggccactaccagaccgccttccgcgagctggagcgcgtgctcaacttcccgcagtcgaacctcgccctcaagcgcgagaagcaggacgagtccgcctccctcacccaggccctcccgtccgagctgaaggtgtccgccgacaacgtgtccctcaccggcgcctggtccctcgcctccatgctcaccgaaatcttcctcctccagcaggcccagggcatgccggagccgggctggggccgcatcaccgactcccaccagtggaacaccctcctctccctccacaacgcccagttcgacctcctccagcgcaccccggaggtggcccgctcccgcgccaccccgctcctcgacctcatcaagaccgccctcaccccgcacccgccgcagaagcaggcctacggcgtgaccctcccgacctcggtgctcttcatcgccggccacgacaccaacctcgccaacctcggcggcgccctggagctgcagtggaccctcccgggccagccggacaacaccccgccgggcggcgagctggtgttcgagcgctggcgccgcctctccgacaactcccagtggattcaggtgtccctcgtgttccagaccctccagcagatgcgcgacaagaccccgctcttcctcaacaccccgccgggcgaggtgaagctcaccctggccggctgcgaggagcgcaacgcgcagggcatgtgctccctcgccggcttcacccagatcgtgaacgaggcccgcatcccggcctgctccctctccgagaaggacgagctgtaacctaggtccccgaatttccccgatcgttcaaacatttggcaataaagtttcttaagattgaatcctgttgccggtcttgcgatgattatcatataatttctgttgaattacgttaagcatgtaataattaacatgtaatgcatgacgttatttatgagatgggtttttatgattagagtcccgcaattatacatttaatacgcgatagaaaacaaaatatagcgcgcaaactaggataaattatcgcgcgcggtgtcatctatgttactagatcgggaattgttaattaagtctaactcgagttactggtacgtatacagggttccttgcgtgaagaagggtggcctgcggttcaccattaacggtcacgactacttccagctagtactggtgaccaacgtcgcggcggcagggtcaatcaagtccatggaggttatgggttccaacacagcggattggatgccgatggcacgtaactggggcgcccaatggcactcactggcctacctcaccggtcaaggtctatcctttagggtcaccaacacagatgaccaaacgctcgtcttcaccaacgtcgtgccaccaggatggaagtttggccagacatttgcaagcaagctgcagttcaagtgagaggagaagcctgaattgataccggagcgtttcttttgggagtaacatctctggttgcctagcaaacatatgattgtatataagtttcgttgtgcgtttattctttcggtgtgtaaaataacatacatgctttcctgatattttcttgtatatatgtacacacacacgacaaatccttccatttctattattattgaacaatttaattgcgagggcgagtacttgtctgtttaccttttttttttcagatggcattttatagtttaacctttcatggaccggcagtagttctaaccatgaatgaaaagaaatcatagtccacaccacgcagggacattgtggtcattttagacaagacgatttgattaatgtcttgtatgatatggtcgacagtgaggactaacaaacatatggcatattttattaccggcgagttaaataaatttatgtcacagtaataaactgcctaataaatgcacgccagaaaatataatgataaaaaaaagaaaagatacataagtccattgcttctacttttttaaaaattaaatccaacattttctattttttggtataaacttggaagtactagttggatatgcaaaatcatctaacctccatatatttcatcaatttgtttactttacatatgggagaggatagtatgtcaaagaaaatgacaacaagcttacaagtttcttattttaaaagttccgctaacttatcaagcatagtgtgccacgcaaaactgacaacaaaccaacaaatttaaggagcgcctaacttatcatctatgacataccgcacaaaatgataacatactagagaaactttattgcacaaaaggaaatttatccataaggcaaaggaacatcttaaggctttggatatacatttaccaacaagcattgtttgtattacccctaaagcgcaagacatgtcatccatgagtcatagtgtgtatatctcaacattgcaaagctaccttttttctattatacttttcgcattataggctagatattatctatacatgtcaacaaactctatccctacgtcatatctgaagattcttttcttcactatataagttggcttccctgtcattgaactcacatcaaccagcccaagtttccaataacatcctcaaatagctggatccaccatgagggtgttgctcgttgccctcgctctcctggctctcgctgcgagcgccaccagcgctgcgcagtccgagccggagctgaagctggagtccgtggtgatcgtgtcgcgccacggggtgcgcgccccgaccaagttcacgcagctcatgcaggacgtgaccccggacgccttctacacctggccggtgaagctcggcgagctgaccccgcgcggcggcgagctgatcgcctacctcggccactactggcgccagcgcctcgtggccgacggcctcctcccgaagaagggctgcccgcagtccggccaggtggcgatcatcgccgacgtggacgagcgcacccgcaagacgggcgaggccttcgccgccggcctcgccccggactgcgccatcaccgtgcacacccaggccgacacctcctccccggacccgctcttcaacccgctcaagaccggcgtgtgccagctcgacgtggcccaggtgaccgacgccatcctggagcgcgccggcggctccatcgccgacttcaccggccactaccagaccgccttccgcgagctggagcgcgtgctcaacttcccgcagtcgaacctcgccctcaagcgcgagaagcaggacgagtccgcctccctcacccaggccctcccgtccgagctgaaggtgtccgccgacaacgtgtccctcaccggcgcctggtccctcgcctccatgctcaccgaaatcttcctcctccagcaggcccagggcatgccggagccgggctggggccgcatcaccgactcccaccagtggaacaccctcctctccctccacaacgcccagttcgacctcctccagcgcaccccggaggtggcccgctcccgcgccaccccgctcctcgacctcatcaagaccgccctcaccccgcacccgccgcagaagcaggcctacggcgtgaccctcccgacctcggtgctcttcatcgccggccacgacaccaacctcgccaacctcggcggcgccctggagctgcagtggaccctcccgggccagccggacaacaccccgccgggcggcgagctggtgttcgagcgctggcgccgcctctccgacaactcccagtggattcaggtgtccctcgtgttccagaccctccagcagatgcgcgacaagaccccgctcttcctcaacaccccgccgggcgaggtgaagctcaccctggccggctgcgaggagcgcaacgcgcagggcatgtgctccctcgccggcttcacccagatcgtgaacgaggcccgcatcccggcctgctccctctccgagaaggacgagctgtaacctaggtccccgaatttccccgatcgttcaaacatttggcaataaagtttcttaagattgaatcctgttgccggtcttgcgatgattatcatataatttctgttgaattacgttaagcatgtaataattaacatgtaatgcatgacgttatttatgagatgggtttttatgattagagtcccgcaattatacatttaatacgcgatagaaaacaaaatatagcgcgcaaactaggataaattatcgcgcgcggtgtcatctatgttactagatcgggaattggaattcctgcagtgcagcgtgacccggtcgtgcccctctctagagataatgagcattgcatgtctaagttataaaaaattaccacatattttttttgtcacacttgtttgaagtgcagtttatctatctttatacatatatttaaactttactctacgaataatataatctatagtactacaataatatcagtgttttagagaatcatataaatgaacagttagacatggtctaaaggacaattgagtattttgacaacaggactctacagttttatctttttagtgtgcatgtgttctcctttttttttgcaaatagcttcacctatataatacttcatccattttattagtacatccatttagggtttagggttaatggtttttatagactaatttttttagtacatctattttattctattttagcctctaaattaagaaaactaaaactctattttagtttttttatttaataatttagatataaaatagaataaaataaagtgactaaaaattaaacaaataccctttaagaaattaaaaaaactaaggaaacatttttcttgtttcgagtagataatgccagcctgttaaacgccgtcgacgagtctaacggacaccaaccagcgaaccagcagcgtcgcgtcgggccaagcgaagcagacggcacggcatctctgtcgctgcctctggacccctctcgagagttccgctccaccgttggacttgctccgctgtcggcatccagaaattgcgtggcggagcggcagacgtgagccggcacggcaggcggcctcctcctcctctcacggcacggcagctacgggggattcctttcccaccgctccttcgctttcccttcctcgcccgccgtaataaatagacaccccctccacaccctctttccccaacctcgtgttgttcggagcgcacacacacacaaccagatctcccccaaatccacccgtcggcacctccgcttcaaggtacgccgctcgtcctccccccccccccctctctaccttctctagatcggcgttccggtccatggttagggcccggtagttctacttctgttcatgtttgtgttagatccgtgtttgtgttagatccgtgctgctagcgttcgtacacggatgcgacctgtacgtcagacacgttctgattgctaacttgccagtgtttctctttggggaatcctgggatggctctagccgttccgcagacgggatcgatttcatgattttttttgtttcgttgcatagggtttggtttgcccttttcctttatttcaatatatgccgtgcacttgtttgtcgggtcatcttttcatgcttttttttgtcttggttgtgatgatgtggtctggttgggcggtcgttctagatcggagtagaattctgtttcaaactacctggtggatttattaattttggatctgtatgtgtgtgccatacatattcatagttacgaattgaagatgatggatggaaatatcgatctaggataggtatacatgttgatgcgggttttactgatgcatatacagagatgctttttgttcgcttggttgtgatgatgtggtgtggttgggcggtcgttcattcgttctagatcggagtagaatactgtttcaaactacctggtgtatttattaattttggaactgtatgtgtgtgtcatacatcttcatagttacgagtttaagatggatggaaatatcgatctaggataggtatacatgttgatgtgggttttactgatgcatatacatgatggcatatgcagcatctattcatatgctctaaccttgagtacctatctattataataaacaagtatgttttataattattttgatcttgatatacttggatgatggcatatgcagcagctatatgtggatttttttagccctgccttcatacgctatttatttgcttggtactgtttcttttgtcgatgctcaccctgttgtttggtgttacttctgcagatccagatctaaaccatgcagaaactcattaactcagtgcaaaactatgcctggggcagcaaaacggcgttgactgaactttatggtatggaaaatccgtccagccagccgatggccgagctgtggatgggcgcacatccgaaaagcagttcacgagtgcagaatgccgccggagatatcgtttcactgcgtgatgtgattgagagtgataaatcgactctgctcggagaggccgttgccaaacgctttggcgaactgcctttcctgttcaaagtattatgcgcagcacagccactctccattcaggttcatccaaacaaacacaattctgaaatcggttttgccaaagaaaatgccgcaggtatcccgatggatgccgccgagcgtaactataaagatcctaaccacaagccggagctggtttttgcgctgacgcctttccttgcgatgaacgcgtttcgtgaattttccgagattgtctccctactccagccggtcgcaggtgcacatccggcgattgctcactttttacaacagcctgatgccgaacgtttaagcgaactgttcgccagcctgttgaatatgcagggtgaagaaaaatcccgcgcgctggcgattttaaaatcggccctcgatagccagcagggtgaaccgtggcaaacgattcgtttaatttctgaattttacccggaagacagcggtctgttctccccgctattgctgaatgtggtgaaattgaaccctggcgaagcgatgttcctgttcgctgaaacaccgcacgcttacctgcaaggcgtggcgctggaagtgatggcaaactccgataacgtgctgcgtgcgggtctgacgcctaaatacattgatattccggaactggttgccaatgtgaaattcgaagccaaaccggctaaccagttgttgacccagccggtgaaacaaggtgcagaactggacttcccgattccagtggatgattttgccttctcgctgcatgaccttagtgataaagaaaccaccattagccagcagagtgccgccattttgttctgcgtcgaaggcgatgcaacgttgtggaaaggttctcagcagttacagcttaaaccgggtgaatcagcgtttattgccgccaacgaatcaccggtgactgtcaaaggccacggccgtttagcgcgtgtttacaacaagctgtaagagcttactgaaaaaattaacatctcttgctaagctgggagctctagatccccgaatttccccgatcgttcaaacatttggcaataaagtttcttaagattgaatcctgttgccggtcttgcgatgattatcatataatttctgttgaattacgttaagcatgtaataattaacatgtaatgcatgacgttatttatgagatgggtttttatgattagagtcccgcaattatacatttaatacgcgatagaaaacaaaatatagcgcgcaaactaggataaattatcgcgcgcggtgtcatctatgttactagatcgggaattggcgagctcgaattaattcagtacattaaaaacgtccgcaatgtgttattaagttgtctaagcgtcaatttgtttac

SEQ ID NO: 156 - DNA, 2314 bp, Artificial Sequence
  Synthetic construct, PY_1053_locus_RB flank
aattgatcgagacggcaatccccctcccctccgcaccgctccgctcccagcggccgacaagccccgcccgtggccgctatcgcgcgcctggaccaccgctccgcccaccgcccgatccccgtccgacggccccggctcgccgacgataaagatggagacgaccgaatttaacccccccaaaaaaaaagagcgtcactcgcacgtacagctagcacgctcgaagctaacaagagctagctctctggcgcgtctgtactccgatcctgtacggtggtgcggcgccgcggctgaggctagctcgatcaccggcgccggcctcatcctctcctcctcatcatctgtctctcttccgaccccgctagctcaggcggattagacagaaaagtcaagacgaccatgcagactgcccgcatggccggagaaacgcgcgcgacgcatgcaccgagctatctatcccctcaaccgcctctcttaaaaccccaccatcactgcgcgctaaacgctacagcaagaaagcctagaaaaagggcctggacgtgccgaacgccgagcaggtcaacgtacggccaggatcatcagcaaggaaaaaattaataaaaaagggcgaagccggccggttggattattagcggttggggacggattgattaggcctgcacagcacacacgcgcgcagtagtagcgtcgtcaggtttagggtgtgtttggtttgacttttggctttggcttttgtttctctaaaaaccaaaagccaaccaaagggctggatctaggaagcagctttttctaaaagccgactttctcgtagtgcaaatctgaaagcacctctggacctgcttttagtggcttttcggatggaactatgaaaacatatatcgaagaatttttaacgacttttagtggtttccatcaaacggtttttagctttttaacaacttacagcctacagcagctttttccacagctcacagcccacagcaacttttttcacagccacagcccaaccaaacagacccttagcgacgctctcgcacaccacagccgcacgcgcgcccgcgtggttgagacgaatctgcagcggcgcaagcgcaacagcaatcccgctttcgttttcctttctccatttaattaaatgtttcatcagaaagcaggcggggaaaaaaataaagcataggagattcgtcgcacccaccaccggccgggccgagatttttttttatcattttctcggtttcgcaataaaggcgaggacgtaaacatatggcgttggttggatcggaggagctagctagcatagcacacggaaagttttgcttatcttttttatatattttttgcataaaaaaaagataatttgatctgccggggtggattatttcctcctcgcgcgcctcggctgcaggggcgtccccgagtgctggtcaatttcgaaatgaaaaagaaaagatggaaagacgcagagagggacgcctcctcatcgctttcttttcccatcagacgaccctgccccctttacttgctttccatctgtttttttcctcccctctgcctccctgctggataatactcgacatgatcaacatcatcttccattccaccttgtatctagctcgcacagcgagcgaggggagcgagatagttggtcggctgccggtacggtgtgtgtacatgtactagctaggcgctcgctcgaattgttgcatgttgagaagtacccatatatagcggctagctgcagctagtctcttgctaaaaatcagctgtaaagtcattcgaggatagaaaacaaaagagccatgaaaaggatatattgtggtgtaaacaaattgacgcttagacaacttaataacacattgcggacgtttttaatgtactgaattaattcgagctcgccaattcccgatctagtaacatagatgacaccgcgcgcgataatttatcctagtttgcgcgctatattttgttttctatcgcgtattaaatgtataattgcgggactctaatcataaaaacccatctcataaataacgtcatgcattacatgttaattattacatgcttaacgtaattcaacagaaattatatgataatcatcgcaagaccggcaacaggattcaatcttaagaaactttattgccaaatgtttgaacgatcggggaaattcggggatctagagctcccagcttagcaagagatgttaattttttcagtaagctcttacagcttgttgtaaacacgcgctaaacggccgtggcctttgacagtcaccggtgattcgttggcggcaataaacgctgattcacccggtttaagc

SEQ ID NO: 157 - DNA, 2248 bp, Artificial Sequence
  Synthetic construct, PY_1053_LB flank
gcttaaaccgggtgaatcagcgtttattgccgccaacgaatcaccggtgactgtcaaaggccacggccgtttagcgcgtgtttacaacaagctgtaagagcttactgaaaaaattaacatctcttgctaagctgggagctctagatccccgaatttccccgatcgttcaaacatttggcaataaagtttcttaagattgaatcctgttgccggtcttgcgatgattatcatataatttctgttgaattacgttaagcatgtaataattaacatgtaatgcatgacgttatttatgagatgggtttttatgattagagtcccgcaattatacatttaatacgcgatagaaaacaaaatatagcgcgcaaactaggataaattatcgcgcgcggtgtcatctatgttactagatcgggaattggcgagctcgaattaattcagtacattaaaaacgtccgcaatgtgttattaagttgtctaagcgtcaatttgtttacaccacaaaagagctagagtggatgggtgggggggacaaatgaaaacaagcgtacgacatcaccagcaccagcaacaataacttaaccacaacacaacaacgacgcccgattattaaacgcggtacaagcgagggcataaaagaaaaaagagggatccccaaaggaggaatggagagggagagctagcgaggccagggacagcgacgtcttcctttcctcctccccccctctggactgagcacgcccccgtccaactccaatatctgcagcagcagtcacggcggcaggaggagagctagggaggggaaaaggagctcggtttttttatataccaaccggccacccgccctacgcgctactactatagcctagctagagccagctgcttgcctcgccctcccctttgcgcgtcgtcgcgctcctcgccgtccccctctctcggaatcggaaggcgatcgatcgcacaaggctgcgtctgcgtgctcggccgccgcccgacccgaccggacaaggaggggagggggcaaaaaaaatatatagttagtcacacgcacgcagcacaggagggaggagagggattgagggataaagaaatttcgggagacaaggagagagagacagagatggagaggagcggctggactcggaggcaggcctttcactactcccgcacccagataacgatgtggtagctagttcctcttaggctaaggtaagcagcagcgccgggagctagctcctcctcactatcctgcatgcttcgttccttcgttcagctttggttgcccggtcgatcgatcggttcttttttgtttcttcgtatacatgcaaagctagctagttggagagttcctttatttttcgatttctttgctttgggagagtgcaattcggttcatcgtcttcttaatttggattctatattcgttttccccgcctggccggtgcttattacgatggtgctgctgctgctcatgagcttcgcaggaaggaggtcgtggccgggatcccgccgatgatgatgacagtggcgccgccggcatgggcgtagcggcgccaccgtacgagaccaccacgtacgtgagccaacgcaccaagatcaacatcgcagcgatctccgccgccgccgccaccagggcggctaccgcggcttctatgtcccactcgcagggattccaccagggcagcgccggcgtctacggctactcctcggatggcttcgaccgcccggacgactccggccaccaggaccatcatcagcagcagcagcacgtggcgcagcagagccgccgcgacaagctgagggtgcaggggttcgacccggccgccggcggcggccacggcctgctccccatcgagggcgacgagcatggcgggcccgggtccatgtacgagcacgcggcggccgcagctggggcctccaacatgctctccgagatgttcaacttccccgcgccgccgtcggggccctccgccaccgagctgctggccagccagatgggcgccaactaccgcttcggggggctacggcagcagcagcagcaggggcccggaggggtggtggctggcttgtccggcgacggcggttggttcgtcggggccggcgcggcgggtcgtgctgctggcttggtcctcggtggtggggccaacatggggtcgttaggtgaaacgtcgtccccgaagcagcagggcagcatggctgggctggccaccgacccggccgccgcgatgcagctcttcctgatgaaccc

SEQ ID NO: 158 - DNA, 2314 bp, Artificial Sequence
  Synthetic construct, PY_1203_locus_RB flank
ccctggtggcgtttgtagttgcggtgcatcccgcaacaaaaatgctaggccgcccccgaggcccgaactttcctgctatccgccccgtccgtggccgaggccggagaaggcgcaccacgccaccacgggcgggcgtgcgcgccgagtcgccgactggcggctgagtgtctgggtttcggcctcagtcgcgggaaaagcagccacggtgctcactgctcgtgctttgtttcgaggtggtcttgctctgtgacgtcacaactcacaaaggaaagggctcctgcaatggaggaagtgctcaagtgcatcttctttctccatatcctgtccttttcggtgccccgaacgtccaagactttagaaaaagaaagatatttttgccattactattctaagccaagtttataagaagaaaaaaacagtcatgtatttatgaattatgacatcaaatgagcactgctagcttcgttttaagctatgttttcatggtttcgctctctgtcgtgataaatgttaatatccttctatatgaatatagtcaaacctttacaagaaaaatagtatatatagagagcaaagcttcggtgaactcgatgctgattgcccttgaataagcgtgctcactgactgtagtatcgtagctaaaaacttgcacgagtctgaacagttctggttattacaaaaatatgtacctaaaaagaatattctctttattttaaattattgattattttgaattttctgtatataaacgctgaaataatttatattttaaaaccgaggaagcagtgttttttacatataaagatctttttgtactttgtcgacgatcaagggtccccggatgggatccaccgcctacggtaccgatttttgtgattgtattactcagaaacaagcttacgcctcatcagacgagcatgtgtgctacgggagtgatctcctgcagttctatctgctgcctccactccaatcagcactcagcgaagtcgtacggggtgtttggttggtagaatgatacgatgcatcgtcgtagatgagagatggacatagaccgatagctccgttttgttttttttttgggacccccctccgatcaagtgtatgacgcatactataggataggccagtttttgtttgtgtccggtgcccttttgaaagtacttggtcagagagctataggagaaagctattattgtaaattacttttaaaaaatatagtcaccttaatttatgacaatatctataccaaattacaattaaataaaaatatatgtccatggtacatatgctactataaatcatattaatgtttatcatgatattatggtaaattacttagaataaaatgaatgagttattgtactctcgcaaactagtagagtaattatcatagcttaaagagtctacaaaataaattattttatgatcatctatatatagaaccgttagggacggatctagaaaaaaaccagaaagctaaagtagtattataataaaaatcgaactctaaataaacgataaaaactataaaatatataataagattataccatgtacacttaaaattttaaaagagattttagtgaattttcatggacttgagagcggtaggaggggctagagcatcagtcacaccgttacatccgtgtctgagaaccgcattgtatatgcaatttttcttgacaagaggaaacccaccttttatagaaagcttaaggagtaacaacattcaactttcaaactactgggtttagcagcttacaggcaggaacaaggccgcaaataaagatatttgtggtattttaaacttggaataatattattgatactaaaaaggcacgaccgtcaaagccgctagattcgtcaacatgtactgaattaattcgagctcgccaattcccgatctagtaacatagatgacaccgcgcgcgataatttatcctagtttgcgcgctatattttgttttctatcgcgtattaaatgtataattgcgggactctaatcataaaaacccatctcataaataacgtcatgcattacatgttaattattacatgcttaacgtaattcaacagaaattatatgataatcatcgcaagaccggcaacaggattcaatcttaagaaactttattgccaaatgtttgaacgatcggggaaattcggggatctagagctcccagcttagcaagagatgttaattttttcagtaagctcttacagcttgttgtaaacacgcgctaaacggccgtggcctttgacagtcaccggtgattcgttggcggcaataaacgctgattcacccggtttaagc

SEQ ID NO: 159 - DNA, 2252 bp, Artificial Sequence
  Synthetic construct, PY1203_LB flank
gcttaaaccgggtgaatcagcgtttattgccgccaacgaatcaccggtgactgtcaaaggccacggccgtttagcgcgtgtttacaacaagctgtaagagcttactgaaaaaattaacatctcttgctaagctgggagctctagatccccgaatttccccgatcgttcaaacatttggcaataaagtttcttaagattgaatcctgttgccggtcttgcgatgattatcatataatttctgttgaattacgttaagcatgtaataattaacatgtaatgcatgacgttatttatgagatgggtttttatgattagagtcccgcaattatacatttaatacgcgatagaaaacaaaatatagcgcgcaaactaggataaattatcgcgcgcggtgtcatctatgttactagatcgggaattggcgagctcgaattaattcagtacattaaaaacgtccgcaatgtgttattaagttgtctaagcgtcaatttgttgtttcaaccctcatagtcatagaagccacctatcttgaccagcagcccgccacaccttccgacgatggatatccgatcataagattcattccactacgaaaataacctaaagataaaccctctcctagcccctgcccaccaccatgtgcacacaaaccccaactacgtaacacatgcgtgcttcgtcgccatcctcctctatataatttacacaatttcttgcgactcccaagtagccaagtatttgcccaaacactgcgtactgaccggcagatacgatccacctcaaacgtgatacgcgacaacatactgaaaaaggcaagcacgtaacttcagctcggtttcaatttgctcctgattttttttttacacctggctgctggtcgccgccgccaccgccgccgccggctcgacacggttctgcgcggacttgagcatgaacccaccaaccccggccttgtcgccagggtcctcgtcgtggtagacgtaggcgaagccgccgtgccgggtcaggtccatgccggacatctcgtcgtcggccgagatgcgcagcaggcccagcttcttgagcgcgtagaagagcgggcccatggtgcagctcacccacccggcgatcaccaggatctggatgatctgcgcggcgaggagcttcccgccgccgcccatgaacagcccgtagggcctcccggcgccgtagatctcctccacgtactttcgcctcgcgaagagccccgtgaagaggacgccccaggcgccacacccgccgtgcagctgcgccgcctccagcgggtcgtcgaacctgaagcgcgccgcgagggcgttggcgccgatgagcacccacgcggacacgaacccgcagatgacggccgcccacggctccaccacgctgcacccggccgtgatggccgcgaacccgccgaggaggccgttgcagacgtccaccacgttccagtggcccgtctggagccgcttcccgaacagcgtggtgagcgcggcgacgctgccggcgagggtggtggtgacggcggtgcggcccacggccgaccactgcccgtggacggtcccggcggggccgtacgacttgaggatggtggtgaaggacccggggttgaacccgtaccagccgaaccacagcaggaaggtgccgagcaccacgagcgacgcgctgtggcccttgagcgccacggagcggccggcgtggtcgaagcgcccgatgcgggggccctcgatgagcgcgccccacagccccgcgatgccgccgaccatgtggacgacgccggagccggcgaagtcgatgacgccggacccgaagagcagcgggccggacgtgcggctggcgccggcccagccgtcggcggaccagaaccagtgcgacaccacggggtagacgaaccccgtcaggaacgcggagtagatgaggtaggcgacgaactgggtccgctcggcgatggagcccgacgtgatgcccgcggcggcgatggcgaaggcccactggtagaggaagaagtcgtagtcgaagccggtcctgggcaggtgcttgagcccgaagaactgcttgccgatgaagccgttggagggcgtgccgaaggcgaaggcgaagccgaagaggtagtagaagagcgcccccgcggcggcgtcgagcacgttggtgagcatgatgttcatggtgttcttggcgcggacggagccggcgcacagcatggcgaagccgagctgcatggcgaacacgaggtaggccgagaagagcaggtacgtggc

SEQ ID NO: 160 - DNA, 24 bp, Artificial Sequence
  Synthetic construct, PCR primer 456
ggcgagctcgaattaattcagtac

SEQ ID NO: 161 - DNA, 21 bp, Artificial Sequence
  Synthetic construct, PCR primer 513
aaacgtccgcaatgtgttatt

SEQ ID NO: 162 - DNA, 24 bp, Artificial Sequence
  Synthetic construct, probe PB21
acgattctgtcctgtggtcactgc

SEQ ID NO: 163 - DNA, 32 bp, Artificial Sequence
  Synthetic construct, probe PB22
cacagatactccatatgcaacttaggtacagc

SEQ ID NO: 164 - DNA, 21 bp, Artificial Sequence
  Synthetic construct, PCR Primer 889
aggtccaggttgtatcagtga

SEQ ID NO: 165 - DNA, 18 bp, Artificial Sequence
  Synthetic construct, PCR Primer 909
gagatcgctgcagagtgc

SEQ ID NO: 166 - DNA, 19 bp, Artificial Sequence
  Synthetic construct, PCR Primer 925
ggtgatgtcgtacgcttgt

SEQ ID NO: 167 - DNA, 24 bp, Artificial Sequence
  Synthetic construct, PCR Primer 926
agctgtaaagtcattcgaggatag

SEQ ID NO: 168 - DNA, 22 bp, Artificial Sequence
  Syntehtic construct, PCR Primer 508
tgttactagatcgggaattggc

SEQ ID NO: 169 - DNA, 32 bp, Artificial Sequence
  Synthetic construct, probe PB23
ctctctctctccttttcatggctcttttgttt

SEQ ID NO: 170 - DNA, 22 bp, Artificial Sequence
  Synthetic construct, PCR Primer 908
atactaaaaaggcacgaccgtc

SEQ ID NO: 171 - DNA, 21 bp, Artificial Sequence
  Synthetic construct, PCR Primer 890
tggtcaagataggtggcttct

SEQ ID NO: 172 - DNA, 25 bp, Artificial Sequence
  Synthetic construct, PCR Primer 855
atgattagagtcccgcaattataca

SEQ ID NO: 173 - DNA, 20 bp, Artificial Sequence
  Synthetic construct, PCR Primer 886
tccctctccattcctccttt

SEQ ID NO: 174 - DNA, 20 bp, Artificial Sequence
  Synthetic construct, PCR Primer 887
cgctcgaattgttgcatgtt

SEQ ID NO: 175 - DNA, 41344 bp, Artificial Sequence
  Synthetic construct, PY53 locus
gcaggaaggattgatcgtgtagattgtagtttagatgaatgtcatgaaattacagaagccacaagggaacaggtctgaggcttacccatatgctttgcttttatcaggaattcaagatctggtgtaatttagtaagactgatgaaattatttataggtcacaatcatccatggagatctaagtgccttccagaaggaaatggaaacagttcatcttgtagttcgtagtctggtaggtacattgtaccatgtttatttctccctttctgttcaagatgaactgattcacttgtagtgctaactacaaactgattacctgttgtgttgcaggaggcaaagcttggacgcctagcttatactcaagtagacatttacctcactgtcttatttttctcccagtgactcaattttgtttcttaatctcatactgaaatgtcttaggatcggacaacacgaggaatatatgatttgtgtgaattcactaaaagattggatcagagcccgaaagctgagactcatcaggcaagtcaacacgtgcctgattcactgcttatgaatttatgaacattatcatgttaagccagtgagaagtttgaacctggtagccgggtcctcttgtgacttcctagggcacaactttgtttataaacaaaaatgtaggttcccattgctgcacaaatttcagagtgacaccaactttgatgcattttatggaatttgtcaactttcttgtttcatcgttgctgattgttattcatatgattttcaggttacatcatcaactcctcgccctgctattgaatcctcagagagaattgctagggtaaaattattgggataccttacattttttgaaatttggatcttcactaattaatattttccccccacaggctggttctttgcccccagctttggaaccagagtctcctagaatagaggcgcctaaggtcaggtttggttcttgtttgagaacacaattgaccagtcttgttccatctgatataatctgcttttgtaggttgtgcgctcatctacaatcatgtcagcatcgggacttagtttgctagctggaactacaacaccacctaaaagagtaagacactgatcacctaaggtgctttgtgatttaaaattacttttttaggtgctccgtctaatgatcactgtgcacattggtaagacaataaatatacttgttgcttatgcaaatgcagcaggtaaataattttgttgcatatactcgatagatggaacatattaaagataactgtgtggtgcatgtcatatattgatagcatgttttgtttctgattctttactactgaaataagtgtatatatttattgtcaccttcatacctctctgtagcatattaactttgagcctactttggttccgctgtgctgtcacagtgtagttttttttcattgtgctttacattccaataacaaaaatggtaaaatctagtaatatataacattctgaaacaactatatatatatataactttaagtattcataaagaaacacaataataggggagactcggtgccagaggcttccacatgagtggggtttgagaaaggataaaccaaggcaagccttcccctgcaaatgcagagatgctgcttcgaacccgtgatctagtgattgtgacttagatggctctcaccactgcaccagacatggtaactcagtgaagcacaataatagctttaagaaaaatgtactgtttggctgttattcaactttgatccaatacactttcatctagctggacaagttagccctgctcatggggttaaacccgccctgtcccacagccaggggtggtaatggatcacaatccaaatgtttcttcataattcgtttgagcccctgattaattttagttcaaaagtgaatagaaatagagcccgatcctaatccaatccgattcataaattcatatattgtggtgtaaacaaattgacgcttagacaacttaataacacattgcggacgtttttaatgtactgaattaattcgagctcgccaattcccgatctagtaacatagatgacaccgcgcgcgataatttatcctagtttgcgcgctatattttgttttctatcgcgtattaaatgtataattgcgggactctaatcataaaaacccatctcataaataacgtcatgcattacatgttaattattacatgcttaacgtaattcaacagaaattatatgataatcatcgcaagaccggcaacaggattcaatcttaagaaactttattgccaaatgtttgaacgatcggggaaattcggggatctagagctcccagcttagcaagagatgttaattttttcagtaagctcttacagcttgttgtaaacacgcgctaaacggccgtggcctttgacagtcaccggtgattcgttggcggcaataaacgctgattcacccggtttaagctgtaactgctgagaacctttccacaacgttgcatcgccttcgacgcagaacaaaatggcggcactctgctggctaatggtggtttctttatcactaaggtcatgcagcgagaaggcaaaatcatccactggaatcgggaagtccagttctgcaccttgtttcaccggctgggtcaacaactggttagccggtttggcttcgaatttcacattggcaaccagttccggaatatcaatgtatttaggcgtcagacccgcacgcagcacgttatcggagtttgccatcacttccagcgccacgccttgcaggtaagcgtgcggtgtttcagcgaacaggaacatcgcttcgccagggttcaatttcaccacattcagcaatagcggggagaacagaccgctgtcttccgggtaaaattcagaaattaaacgaatcgtttgccacggttcaccctgctggctatcgagggccgattttaaaatcgccagcgcgcgggatttttcttcaccctgcatattcaacaggctggcgaacagttcgcttaaacgttcggcatcaggctgttgtaaaaagtgagcaatcgccggatgtgcacctgcgaccggctggagtagggagacaatctcggaaaattcacgaaacgcgttcatcgcaaggaaaggcgtcagcgcaaaaaccagctccggcttgtggttaggatctttatagttacgctcggcggcatccatcgggatacctgcggcattttctttggcaaaaccgatttcagaattgtgtttgtttggatgaacctgaatggagagtggctgtgctgcgcataatactttgaacaggaaaggcagttcgccaaagcgtttggcaacggcctctccgagcagagtcgatttatcactctcaatcacatcacgcagtgaaacgatatctccggcggcattctgcactcgtgaactgcttttcggatgtgcgcccatccacagctcggccatcggctggctggacggattttccataccataaagttcagtcaacgccgttttgctgccccaggcatagttttgcactgagttaatgagtttctgcatctgcagaagtaacaccaaacaacagggtgagcatcgacaaaagaaacagtaccaagcaaataaatagcgtatgaaggcagggctaaaaaaatccacatatagctgctgcatatgccatcatccaagtatatcaagatcaaaataattataaaacatacttgtttattataatagataggtactcaaggttagagcatatgaatagatgctgcatatgccatcatgtatatgcatcagtaaaacccacatcaacatgtatacctatcctagatcgatatttccatccatcttaaactcgtaactatgaagatgtatgacacacacatacagttccaaaattaataaatacaccaggtagtttgaaacagtattctactccgatctagaacgaatgaacgaccgcccaaccacaccacatcatcacaaccaagcgaacaaaaagcatctctgtatatgcatcagtaaaacccgcatcaacatgtatacctatcctagatcgatatttccatccatcatcttcaattcgtaactatgaatatgtatggcacacacatacagatccaaaattaataaatccaccaggtagtttgaaacagaattctactccgatctagaacgaccgcccaaccagaccacatcatcacaaccaagacaaaaaaaagcatgaaaagatgacccgacaaacaagtgcacggcatatattgaaataaaggaaaagggcaaaccaaaccctatgcaacgaaacaaaaaaaatcatgaaatcgatcccgtctgcggaacggctagagccatcccaggattccccaaagagaaacactggcaagttagcaatcagaacgtgtctgacgtacaggtcgcatccgtgtacgaacgctagcagcacggatctaacacaaacacggatctaacacaaacatgaacagaagtagaactaccgggccctaaccatggaccggaacgccgatctagagaaggtagagagggggggggggggaggacgagcggcgtaccttgaagcggaggtgccgacgggtggatttgggggagatctggttgtgtgtgtgtgcgctccgaacaacacgaggttggggaaagagggtgtggagggggtgtctatttattacggcgggcgaggaagggaaagcgaaggagcggtgggaaaggaatcccccgtagctgccgtgccgtgagaggaggaggaggccgcctgccgtgccggctcacgtctgccgctccgccacgcaatttctggatgccgacagcggagcaagtccaacggtggagcggaactctcgagaggggtccagaggcagcgacagagatgccgtgccgtctgcttcgcttggcccgacgcgacgctgctggttcgctggttggtgtccgttagactcgtcgacggcgtttaacaggctggcattatctactcgaaacaagaaaaatgtttccttagtttttttaatttcttaaagggtatttgtttaatttttagtcactttattttattctattttatatctaaattattaaataaaaaaactaaaatagagttttagttttcttaatttagaggctaaaatagaataaaatagatgtactaaaaaaattagtctataaaaaccattaaccctaaaccctaaatggatgtactaataaaatggatgaagtattatataggtgaagctatttgcaaaaaaaaaggagaacacatgcacactaaaaagataaaactgtagagtcctgttgtcaaaatactcaattgtcctttagaccatgtctaactgttcatttatatgattctctaaaacactgatattattgtagtactatagattatattattcgtagagtaaagtttaaatatatgtataaagatagataaactgcacttcaaacaagtgtgacaaaaaaaatatgtggtaattttttataacttagacatgcaatgctcattatctctagagaggggcacgaccgggtcacgctgcactgcaggaattccaattcccgatctagtaacatagatgacaccgcgcgcgataatttatcctagtttgcgcgctatattttgttttctatcgcgtattaaatgtataattgcgggactctaatcataaaaacccatctcataaataacgtcatgcattacatgttaattattacatgcttaacgtaattcaacagaaattatatgataatcatcgcaagaccggcaacaggattcaatcttaagaaactttattgccaaatgtttgaacgatcggggaaattcggggacctaggtcacagctcgtccttctcgctcaggctgcaggccggaatcctggcctcgttcacgatctgggtgaagccggccaggctgcacatgccctgggcgttcctctcctcgcagccggccagggtcagcttcacctcgcccggcggggtgttcaggaacagcggggtcttgtccctcatctgctgcagggtctggaacaccaggctcacctgaatccactggctgttgtcgctcagcctcctccacctctcgaacaccagctcgccgcccggcggggtgttgtccggctggcccggcagggtccactgcagctcgagggcgccgcccaggttggccaggttggtgtcgtggccggcgatgaacagcacgctggtcggcagggtcacgccgtaggcctgcttctgcggcgggtgcggggtcagggcggtcttgatcaggtccagcagcggggtggccctgctcctggccacctccggggtcctctgcagcaggtcgaactgggcgttgtgcaggctcagcagggtgttccactggtggctgtcggtgatcctgccccagcccggctccggcatgccctgggcctgctgcagcaggaaaatctcggtcagcatgctggccaggctccaggcgccggtcaggctcacgttgtcggcgctcaccttcagctcgctcggcagggcctgggtcaggctggcgctctcgtcctgcttctccctcttcagggccaggttgctctgcgggaagttcagcaccctctccagctccctgaaggcggtctggtagtggccggtgaagtcggcgatgctgccgccggccctctccaggatggcgtcggtcacctgggccacgtccagctggcacacgccggtcttcagcgggttgaacagcgggtccgggctgctggtgtcggcctgggtgtgcacggtgatggcgcagtccggggccaggccggcggcgaaggcctcaccggtcttcctggtcctctcgtccacgtcggcgatgatggccacctggccgctctgcgggcagcccttcttcggcagcaggccgtcggccaccagcctctgcctccagtagtggcccaggtaggcgatcagctcgccgcccctcggggtcagctcgcccagcttcaccggccaggtgtagaacgcgtccggggtcacgtcctgcatcagctgggtgaacttggtcggggccctcacgccgtgcctgctcacgatcaccacgctctccagcttcagctccggctcgctctgggcagaggtggcgctggcagcaagagccagcagggccagggccacgagcagcacgcgcatggtttaggatccggtgtcgatcgggttcttctgcgctctggagtagataaagctaatggtctgaagacccagtggtggtgatggagaagtgcacaggcatgcgagcgttatttatagctttgattaattaacacaatttcttgtgttcttatgccaccgagacggctgtaggcagcttcatggtttcttgccaaatgtatatgactcgtcactctctttacgtagcacgtcgatggttcatctggaatcattctgtacttctgcgtggctcagttttgttgccttctacaggttgttgatctacgtaaaacgaattagatttagcttgacatatggctttttttttgttgtaaatttactttacacgtcaaggatttttgtcctgttccggcctattttatttttcatgaaacgatctttgtaatgcaatatgagttgtttgtaatgtcttgtgagctgtaagcatgtatatcagatgagtatgatctcggcatgactcaccgtgtttctttgcacacagagaggatttgtttgattgtttcttacccaatacccttgacgtgcaattttggttgatgttctgtgagttgttaaggatacaacgaattcttggagctttacatgccaatgcatggttgtttcgtgttcctcaacatttaaggacttattcggttgcacctggatcgaaggggattgggagaaatcgattaaatctccttctatttaattttgactaggaagagatttaatcgtttccaacccctttcgatccagacgtaagcgaacaagttatttatttggatacctcttattcatcttaatacacacatggtattaagttgccactagtcatatgcctgtgcattgctacggtttatattatatatatatatatatatatatatatatatatatatatatatgataaattttgttttaataaaacatatgttttctattgattaggttgtgtgaatatgagccaacaaccaaggtccagaacacttatacataatttcaccttattttgtacataaactctcttattatagtagtaagagaagagattataagagtgcgggttgattataaagaaatgtaggagttttttaataatattgacacgagacgatcgttgaactggtgctttaatatagtaaagataaagattggtgttggggacttgttctcaaatgctatgaattaagaacaaggcaacataaaatgttaaatatcaaaatccttcgtccttcgaagcattattttcctttggatataatggatttcggacgaaggttatgaaggtcataccttcataatcataatcaaatgaaaaagtaaagaagattcacacataaaataatatgattactttggtacccaattcccgatctagtaacatagatgacaccgcgcgcgataatttatcctagtttgcgcgctatattttgttttctatcgcgtattaaatgtataattgcgggactctaatcataaaaacccatctcataaataacgtcatgcattacatgttaattattacatgcttaacgtaattcaacagaaattatatgataatcatcgcaagaccggcaacaggattcaatcttaagaaactttattgccaaatgtttgaacgatcggggaaattcggggacctaggtcacagctcgtccttctcgctcaggctgcaggccggaatcctggcctcgttcacgatctgggtgaagccggccaggctgcacatgccctgggcgttcctctcctcgcagccggccagggtcagcttcacctcgcccggcggggtgttcaggaacagcggggtcttgtccctcatctgctgcagggtctggaacaccaggctcacctgaatccactggctgttgtcgctcagcctcctccacctctcgaacaccagctcgccgcccggcggggtgttgtccggctggcccggcagggtccactgcagctcgagggcgccgcccaggttggccaggttggtgtcgtggccggcgatgaacagcacgctggtcggcagggtcacgccgtaggcctgcttctgcggcgggtgcggggtcagggcggtcttgatcaggtccagcagcggggtggccctgctcctggccacctccggggtcctctgcagcaggtcgaactgggcgttgtgcaggctcagcagggtgttccactggtggctgtcggtgatcctgccccagcccggctccggcatgccctgggcctgctgcagcaggaaaatctcggtcagcatgctggccaggctccaggcgccggtcaggctcacgttgtcggcgctcaccttcagctcgctcggcagggcctgggtcaggctggcgctctcgtcctgcttctccctcttcagggccaggttgctctgcgggaagttcagcaccctctccagctccctgaaggcggtctggtagtggccggtgaagtcggcgatgctgccgccggccctctccaggatggcgtcggtcacctgggccacgtccagctggcacacgccggtcttcagcgggttgaacagcgggtccgggctgctggtgtcggcctgggtgtgcacggtgatggcgcagtccggggccaggccggcggcgaaggcctcaccggtcttcctggtcctctcgtccacgtcggcgatgatggccacctggccgctctgcgggcagcccttcttcggcagcaggccgtcggccaccagcctctgcctccagtagtggcccaggtaggcgatcagctcgccgcccctcggggtcagctcgcccagcttcaccggccaggtgtagaacgcgtccggggtcacgtcctgcatcagctgggtgaacttggtcggggccctcacgccgtgcctgctcacgatcaccacgctctccagcttcagctccggctcgctctgggcagaggtggcgctggcagcaagagccagcagggccagggccacgagcagcacgcgcatggtttaggatccggtgtcgatcgggttcttctgcgctctggagtagataaagctaatggtctgaagacccagtggtggtgatggagaagtgcacaggcatgcgagcgttatttatagctttgattaattaacacaatttcttgtgttcttatgccaccgagacggctgtaggcagcttcatggtttcttgccaaatgtatatgactcgtcactctctttacgtagcacgtcgatggttcatctggaatcattctgtacttctgcgtggctcagttttgttgccttctacaggttgttgatctacgtaaaacgaattagatttagcttgacatatggctttttttttgttgtaaatttactttacacgtcaaggatttttgtcctgttccggcctattttatttttcatgaaacgatctttgtaatgcaatatgagttgtttgtaatgtcttgtgagctgtaagcatgtatatcagatgagtatgatctcggcatgactcaccgtgtttctttgcacacagagaggatttgtttgattgtttcttacccaatacccttgacgtgcaattttggttgatgttctgtgagttgttaaggatacaacgaattcttggagctttacatgccaatgcatggttgtttcgtgttcctcaacatttaaggacttattcggttgcacctggatcgaaggggattgggagaaatcgattaaatctccttctatttaattttgactaggaagagatttaatcgtttccaacccctttcgatccagacgtaagcgaacaagttatttatttggatacctcttattcatcttaatacacacatggtattaagttgccactagtcatatgcctgtgcattgctacggtttatattatatatatatatatatatatatatatatatatatatatatatgataaattttgttttaataaaacatatgttttctattgattaggttgtgtgaatatgagccaacaaccaaggtccagaacacttatacataatttcaccttattttgtacataaactctcttattatagtagtaagagaagagattataagagtgcgggttgattataaagaaatgtaggagttttttaataatattgacacgagacgatcgttgaactggtgctttaatatagtaaagataaagattggtgttggggacttgttctcaaatgctatgaattaagaacaaggcaacataaaatgttaaatatcaaaatccttcgtccttcgaagcattattttcctttggatataatggatttcggacgaaggttatgaaggtcataccttcataatcataatcaaatgaaaaagtaaagaagattcacacataaaataatatgattactttggtacccaattcccgatctagtaacatagatgacaccgcgcgcgataatttatcctagtttgcgcgctatattttgttttctatcgcgtattaaatgtataattgcgggactctaatcataaaaacccatctcataaataacgtcatgcattacatgttaattattacatgcttaacgtaattcaacagaaattatatgataatcatcgcaagaccggcaacaggattcaatcttaagaaactttattgccaaatgtttgaacgatcggggaaattcggggacctaggtcacagctcgtccttctcgctcaggctgcaggccggaatcctggcctcgttcacgatctgggtgaagccggccaggctgcacatgccctgggcgttcctctcctcgcagccggccagggtcagcttcacctcgcccggcggggtgttcaggaacagcggggtcttgtccctcatctgctgcagggtctggaacaccaggctcacctgaatccactggctgttgtcgctcagcctcctccacctctcgaacaccagctcgccgcccggcggggtgttgtccggctggcccggcagggtccactgcagctcgagggcgccgcccaggttggccaggttggtgtcgtggccggcgatgaacagcacgctggtcggcagggtcacgccgtaggcctgcttctgcggcgggtgcggggtcagggcggtcttgatcaggtccagcagcggggtggccctgctcctggccacctccggggtcctctgcagcaggtcgaactgggcgttgtgcaggctcagcagggtgttccactggtggctgtcggtgatcctgccccagcccggctccggcatgccctgggcctgctgcagcaggaaaatctcggtcagcatgctggccaggctccaggcgccggtcaggctcacgttgtcggcgctcaccttcagctcgctcggcagggcctgggtcaggctggcgctctcgtcctgcttctccctcttcagggccaggttgctctgcgggaagttcagcaccctctccagctccctgaaggcggtctggtagtggccggtgaagtcggcgatgctgccgccggccctctccaggatggcgtcggtcacctgggccacgtccagctggcacacgccggtcttcagcgggttgaacagcgggtccgggctgctggtgtcggcctgggtgtgcacggtgatggcgcagtccggggccaggccggcggcgaaggcctcaccggtcttcctggtcctctcgtccacgtcggcgatgatggccacctggccgctctgcgggcagcccttcttcggcagcaggccgtcggccaccagcctctgcctccagtagtggcccaggtaggcgatcagctcgccgcccctcggggtcagctcgcccagcttcaccggccaggtgtagaacgcgtccggggtcacgtcctgcatcagctgggtgaacttggtcggggccctcacgccgtgcctgctcacgatcaccacgctctccagcttcagctccggctcgctctgggcagaggtggcgctggcagcaagagccagcagggccagggccacgagcagcacgcgcatggtttaggatccggtgtcgatcgggttcttctgcgctctggagtagataaagctaatggtctgaagacccagtggtggtgatggagaagtgcacaggcatgcgagcgttatttatagctttgattaattaacacaatttcttgtgttcttatgccaccgagacggctgtaggcagcttcatggtttcttgccaaatgtatatgactcgtcactctctttacgtagcacgtcgatggttcatctggaatcattctgtacttctgcgtggctcagttttgttgccttctacaggttgttgatctacgtaaaacgaattagatttagcttgacatatggctttttttttgttgtaaatttactttacacgtcaaggatttttgtcctgttccggcctattttatttttcatgaaacgatctttgtaatgcaatatgagttgtttgtaatgtcttgtgagctgtaagcatgtatatcagatgagtatgatctcggcatgactcaccgtgtttctttgcacacagagaggatttgtttgattgtttcttacccaatacccttgacgtgcaattttggttgatgttctgtgagttgttaaggatacaacgaattcttggagctttacatgccaatgcatggttgtttcgtgttcctcaacatttaaggacttattcggttgcacctggatcgaaggggattgggagaaatcgattaaatctccttctatttaattttgactaggaagagatttaatcgtttccaacccctttcgatccagacgtaagcgaacaagttatttatttggatacctcttattcatcttaatacacacatggtattaagttgccactagtcatatgcctgtgcattgctacggtttatattatatatatatatatatatatatatatatatatatatatatatgataaattttgttttaataaaacatatgttttctattgattaggttgtgtgaatatgagccaacaaccaaggtccagaacacttatacataatttcaccttattttgtacataaactctcttattatagtagtaagagaagagattataagagtgcgggttgattataaagaaatgtaggagttttttaataatattgacacgagacgatcgttgaactggtgctttaatatagtaaagataaagattggtgttggggacttgttctcaaatgctatgaattaagaacaaggcaacataaaatgttaaatatcaaaatccttcgtccttcgaagcattattttcctttggatataatggatttcggacgaaggttatgaaggtcataccttcataatcataatcaaatgaaaaagtaaagaagattcacacataaaataatatgattactttggtacccaattcccgatctagtaacatagatgacaccgcgcgcgataatttatcctagtttgcgcgctatattttgttttctatcgcgtattaaatgtataattgcgggactctaatcataaaaacccatctcataaataacgtcatgcattacatgttaattattacatgcttaacgtaattcaacagaaattatatgataatcatcgcaagaccggcaacaggattcaatcttaagaaactttattgccaaatgtttgaacgatcggggaaattcggggacctaggtcacagctcgtccttctcgctcaggctgcaggccggaatcctggcctcgttcacgatctgggtgaagccggccaggctgcacatgccctgggcgttcctctcctcgcagccggccagggtcagcttcacctcgcccggcggggtgttcaggaacagcggggtcttgtccctcatctgctgcagggtctggaacaccaggctcacctgaatccactggctgttgtcgctcagcctcctccacctctcgaacaccagctcgccgcccggcggggtgttgtccggctggcccggcagggtccactgcagctcgagggcgccgcccaggttggccaggttggtgtcgtggccggcgatgaacagcacgctggtcggcagggtcacgccgtaggcctgcttctgcggcgggtgcggggtcagggcggtcttgatcaggtccagcagcggggtggccctgctcctggccacctccggggtcctctgcagcaggtcgaactgggcgttgtgcaggctcagcagggtgttccactggtggctgtcggtgatcctgccccagcccggctccggcatgccctgggcctgctgcagcaggaaaatctcggtcagcatgctggccaggctccaggcgccggtcaggctcacgttgtcggcgctcaccttcagctcgctcggcagggcctgggtcaggctggcgctctcgtcctgcttctccctcttcagggccaggttgctctgcgggaagttcagcaccctctccagctccctgaaggcggtctggtagtggccggtgaagtcggcgatgctgccgccggccctctccaggatggcgtcggtcacctgggccacgtccagctggcacacgccggtcttcagcgggttgaacagcgggtccgggctgctggtgtcggcctgggtgtgcacggtgatggcgcagtccggggccaggccggcggcgaaggcctcaccggtcttcctggtcctctcgtccacgtcggcgatgatggccacctggccgctctgcgggcagcccttcttcggcagcaggccgtcggccaccagcctctgcctccagtagtggcccaggtaggcgatcagctcgccgcccctcggggtcagctcgcccagcttcaccggccaggtgtagaacgcgtccggggtcacgtcctgcatcagctgggtgaacttggtcggggccctcacgccgtgcctgctcacgatcaccacgctctccagcttcagctccggctcgctctgggcagaggtggcgctggcagcaagagccagcagggccagggccacgagcagcacgcgcatggtttaggatccggtgtcgatcgggttcttctgcgctctggagtagataaagctaatggtctgaagacccagtggtggtgatggagaagtgcacaggcatgcgagcgttatttatagctttgattaattaacacaatttcttgtgttcttatgccaccgagacggctgtaggcagcttcatggtttcttgccaaatgtatatgactcgtcactctctttacgtagcacgtcgatggttcatctggaatcattctgtacttctgcgtggctcagttttgttgccttctacaggttgttgatctacgtaaaacgaattagatttagcttgacatatggctttttttttgttgtaaatttactttacacgtcaaggatttttgtcctgttccggcctattttatttttcatgaaacgatctttgtaatgcaatatgagttgtttgtaatgtcttgtgagctgtaagcatgtatatcagatgagtatgatctcggcatgactcaccgtgtttctttgcacacagagaggatttgtttgattgtttcttacccaatacccttgacgtgcaattttggttgatgttctgtgagttgttaaggatacaacgaattcttggagctttacatgccaatgcatggttgtttcgtgttcctcaacatttaaggacttattcggttgcacctggatcgaaggggattgggagaaatcgattaaatctccttctatttaattttgactaggaagagatttaatcgtttccaacccctttcgatccagacgtaagcgaacaagttatttatttggatacctcttattcatcttaatacacacatggtattaagttgccactagtcatatgcctgtgcattgctacggtttatattatatatatatatatatatatatatatatatatatatatatatgataaattttgttttaataaaacatatgttttctattgattaggttgtgtgaatatgagccaacaaccaaggtccagaacacttatacataatttcaccttattttgtacataaactctcttattatagtagtaagagaagagattataagagtgcgggttgattataaagaaatgtaggagttttttaataatattgacacgagacgatcgttgaactggtgctttaatatagtaaagataaagattggtgttggggacttgttctcaaatgctatgaattaagaacaaggcaacataaaatgttaaatatcaaaatccttcgtccttcgaagcattattttcctttggatataatggatttcggacgaaggttatgaaggtcataccttcataatcataatcaaatgaaaaagtaaagaagattcacacataaaataatatgattactttggtaccttgattccatggatttggtacgtaccagtaactcgagttagacttaattaagctgagtggctccttcaacgttgcggttctgtcagttccaaacgtaaaacggcttgtcccgcgtcatcggcgggggtcataacgtgactcccttaattctccgctcatgatcaggttgtcgtttcccgccttcagtttaaactatcagtgttcactgatagtttaaactgaaggcgggaaacgacaacctgatcatgagcggagaattaagggagtcacgttatgacccccgccgatgacgcgggacaagccgttttacgtttggaactgacagaaccgcaacgttgaaggagccactcagcttaattaagtctaactcgagttactggtacgtaccaaatccatggaatcaaggtaccaaagtaatcatattattttatgtgtgaatcttctttactttttcatttgattatgattatgaaggtatgaccttcataaccttcgtccgaaatccattatatccaaaggaaaataatgcttcgaaggacgaaggattttgatatttaacattttatgttgccttgttcttaattcatagcatttgagaacaagtccccaacaccaatctttatctttactatattaaagcaccagttcaacgatcgtctcgtgtcaatattattaaaaaactcctacatttctttataatcaacccgcactcttataatctcttctcttactactataataagagagtttatgtacaaaataaggtgaaattatgtataagtgttctggaccttggttgttggctcatattcacacaacctaatcaatagaaaacatatgttttattaaaacaaaatttatcatatatatatatatatatatatatatatatatatatatatataatataaaccgtagcaatgcacaggcatatgactagtggcaacttaataccatgtgtgtattaagatgaataagaggtatccaaataaataacttgttcgcttacgtctggatcgaaaggggttggaaacgattaaatctcttcctagtcaaaattaaatagaaggagatttaatcgatttctcccaatccccttcgatccaggtgcaaccgaataagtccttaaatgttgaggaacacgaaacaaccatgcattggcatgtaaagctccaagaattcgttgtatccttaacaactcacagaacatcaaccaaaattgcacgtcaagggtattgggtaagaaacaatcaaacaaatcctctctgtgtgcaaagaaacacggtgagtcatgccgagatcatactcatctgatatacatgcttacagctcacaagacattacaaacaactcatattgcattacaaagatcgtttcatgaaaaataaaataggccggaacaggacaaaaatccttgacgtgtaaagtaaatttacaacaaaaaaaaagccatatgtcaagctaaatctaattcgttttacgtagatcaacaacctgtagaaggcaacaaaactgagccacgcagaagtacagaatgattccagatgaaccatcgacgtgctacgtaaagagagtgacgagtcatatacatttggcaagaaaccatgaagctgcctacagccgtctcggtggcataagaacacaagaaattgtgttaattaatcaaagctataaataacgctcgcatgcctgtgcacttctccatcaccaccactgggtcttcagaccattagctttatctactccagagcgcagaagaacccgatcgacaccggatcctaaaccatgcgcgtgctgctcgtggccctggccctgctggctcttgctgccagcgccacctctgcccagagcgagccggagctgaagctggagagcgtggtgatcgtgagcaggcacggcgtgagggccccgaccaagttcacccagctgatgcaggacgtgaccccggacgcgttctacacctggccggtgaagctgggcgagctgaccccgaggggcggcgagctgatcgcctacctgggccactactggaggcagaggctggtggccgacggcctgctgccgaagaagggctgcccgcagagcggccaggtggccatcatcgccgacgtggacgagaggaccaggaagaccggtgaggccttcgccgccggcctggccccggactgcgccatcaccgtgcacacccaggccgacaccagcagcccggacccgctgttcaacccgctgaagaccggcgtgtgccagctggacgtggcccaggtgaccgacgccatcctggagagggccggcggcagcatcgccgacttcaccggccactaccagaccgccttcagggagctggagagggtgctgaacttcccgcagagcaacctggccctgaagagggagaagcaggacgagagcgccagcctgacccaggccctgccgagcgagctgaaggtgagcgccgacaacgtgagcctgaccggcgcctggagcctggccagcatgctgaccgagattttcctgctgcagcaggcccagggcatgccggagccgggctggggcaggatcaccgacagccaccagtggaacaccctgctgagcctgcacaacgcccagttcgacctgctgcagaggaccccggaggtggccaggagcagggccaccccgctgctggacctgatcaagaccgccctgaccccgcacccgccgcagaagcaggcctacggcgtgaccctgccgaccagcgtgctgttcatcgccggccacgacaccaacctggccaacctgggcggcgccctcgagctgcagtggaccctgccgggccagccggacaacaccccgccgggcggcgagctggtgttcgagaggtggaggaggctgagcgacaacagccagtggattcaggtgagcctggtgttccagaccctgcagcagatgagggacaagaccccgctgttcctgaacaccccgccgggcgaggtgaagctgaccctggccggctgcgaggagaggaacgcccagggcatgtgcagcctggccggcttcacccagatcgtgaacgaggccaggattccggcctgcagcctgagcgagaaggacgagctgtgacctaggtccccgaatttccccgatcgttcaaacatttggcaataaagtttcttaagattgaatcctgttgccggtcttgcgatgattatcatataatttctgttgaattacgttaagcatgtaataattaacatgtaatgcatgacgttatttatgagatgggtttttatgattagagtcccgcaattatacatttaatacgcgatagaaaacaaaatatagcgcgcaaactaggataaattatcgcgcgcggtgtcatctatgttactagatcgggaattgggtaccaaagtaatcatattattttatgtgtgaatcttctttactttttcatttgattatgattatgaaggtatgaccttcataaccttcgtccgaaatccattatatccaaaggaaaataatgcttcgaaggacgaaggattttgatatttaacattttatgttgccttgttcttaattcatagcatttgagaacaagtccccaacaccaatctttatctttactatattaaagcaccagttcaacgatcgtctcgtgtcaatattattaaaaaactcctacatttctttataatcaacccgcactcttataatctcttctcttactactataataagagagtttatgtacaaaataaggtgaaattatgtataagtgttctggaccttggttgttggctcatattcacacaacctaatcaatagaaaacatatgttttattaaaacaaaatttatcatatatatatatatatatatatatatatatatatatatatataatataaaccgtagcaatgcacaggcatatgactagtggcaacttaataccatgtgtgtattaagatgaataagaggtatccaaataaataacttgttcgcttacgtctggatcgaaaggggttggaaacgattaaatctcttcctagtcaaaattaaatagaaggagatttaatcgatttctcccaatccccttcgatccaggtgcaaccgaataagtccttaaatgttgaggaacacgaaacaaccatgcattggcatgtaaagctccaagaattcgttgtatccttaacaactcacagaacatcaaccaaaattgcacgtcaagggtattgggtaagaaacaatcaaacaaatcctctctgtgtgcaaagaaacacggtgagtcatgccgagatcatactcatctgatatacatgcttacagctcacaagacattacaaacaactcatattgcattacaaagatcgtttcatgaaaaataaaataggccggaacaggacaaaaatccttgacgtgtaaagtaaatttacaacaaaaaaaaagccatatgtcaagctaaatctaattcgttttacgtagatcaacaacctgtagaaggcaacaaaactgagccacgcagaagtacagaatgattccagatgaaccatcgacgtgctacgtaaagagagtgacgagtcatatacatttggcaagaaaccatgaagctgcctacagccgtctcggtggcataagaacacaagaaattgtgttaattaatcaaagctataaataacgctcgcatgcctgtgcacttctccatcaccaccactgggtcttcagaccattagctttatctactccagagcgcagaagaacccgatcgacaccggatcctaaaccatgcgcgtgctgctcgtggccctggccctgctggctcttgctgccagcgccacctctgcccagagcgagccggagctgaagctggagagcgtggtgatcgtgagcaggcacggcgtgagggccccgaccaagttcacccagctgatgcaggacgtgaccccggacgcgttctacacctggccggtgaagctgggcgagctgaccccgaggggcggcgagctgatcgcctacctgggccactactggaggcagaggctggtggccgacggcctgctgccgaagaagggctgcccgcagagcggccaggtggccatcatcgccgacgtggacgagaggaccaggaagaccggtgaggccttcgccgccggcctggccccggactgcgccatcaccgtgcacacccaggccgacaccagcagcccggacccgctgttcaacccgctgaagaccggcgtgtgccagctggacgtggcccaggtgaccgacgccatcctggagagggccggcggcagcatcgccgacttcaccggccactaccagaccgccttcagggagctggagagggtgctgaacttcccgcagagcaacctggccctgaagagggagaagcaggacgagagcgccagcctgacccaggccctgccgagcgagctgaaggtgagcgccgacaacgtgagcctgaccggcgcctggagcctggccagcatgctgaccgagattttcctgctgcagcaggcccagggcatgccggagccgggctggggcaggatcaccgacagccaccagtggaacaccctgctgagcctgcacaacgcccagttcgacctgctgcagaggaccccggaggtggccaggagcagggccaccccgctgctggacctgatcaagaccgccctgaccccgcacccgccgcagaagcaggcctacggcgtgaccctgccgaccagcgtgctgttcatcgccggccacgacaccaacctggccaacctgggcggcgccctcgagctgcagtggaccctgccgggccagccggacaacaccccgccgggcggcgagctggtgttcgagaggtggaggaggctgagcgacaacagccagtggattcaggtgagcctggtgttccagaccctgcagcagatgagggacaagaccccgctgttcctgaacaccccgccgggcgaggtgaagctgaccctggccggctgcgaggagaggaacgcccagggcatgtgcagcctggccggcttcacccagatcgtgaacgaggccaggattccggcctgcagcctgagcgagaaggacgagctgtgacctaggtccccgaatttccccgatcgttcaaacatttggcaataaagtttcttaagattgaatcctgttgccggtcttgcgatgattatcatataatttctgttgaattacgttaagcatgtaataattaacatgtaatgcatgacgttatttatgagatgggtttttatgattagagtcccgcaattatacatttaatacgcgatagaaaacaaaatatagcgcgcaaactaggataaattatcgcgcgcggtgtcatctatgttactagatcgggaattggaattcctgcagtgcagcgtgacccggtcgtgcccctctctagagataatgagcattgcatgtctaagttataaaaaattaccacatattttttttgtcacacttgtttgaagtgcagtttatctatctttatacatatatttaaactttactctacgaataatataatctatagtactacaataatatcagtgttttagagaatcatataaatgaacagttagacatggtctaaaggacaattgagtattttgacaacaggactctacagttttatctttttagtgtgcatgtgttctcctttttttttgcaaatagcttcacctatataatacttcatccattttattagtacatccatttagggtttagggttaatggtttttatagactaatttttttagtacatctattttattctattttagcctctaaattaagaaaactaaaactctattttagtttttttatttaataatttagatataaaatagaataaaataaagtgactaaaaattaaacaaataccctttaagaaattaaaaaaactaaggaaacatttttcttgtttcgagtagataatgccagcctgttaaacgccgtcgacgagtctaacggacaccaaccagcgaaccagcagcgtcgcgtcgggccaagcgaagcagacggcacggcatctctgtcgctgcctctggacccctctcgagagttccgctccaccgttggacttgctccgctgtcggcatccagaaattgcgtggcggagcggcagacgtgagccggcacggcaggcggcctcctcctcctctcacggcacggcagctacgggggattcctttcccaccgctccttcgctttcccttcctcgcccgccgtaataaatagacaccccctccacaccctctttccccaacctcgtgttgttcggagcgcacacacacacaaccagatctcccccaaatccacccgtcggcacctccgcttcaaggtacgccgctcgtcctccccccccccccctctctaccttctctagatcggcgttccggtccatggttagggcccggtagttctacttctgttcatgtttgtgttagatccgtgtttgtgttagatccgtgctgctagcgttcgtacacggatgcgacctgtacgtcagacacgttctgattgctaacttgccagtgtttctctttggggaatcctgggatggctctagccgttccgcagacgggatcgatttcatgattttttttgtttcgttgcatagggtttggtttgcccttttcctttatttcaatatatgccgtgcacttgtttgtcgggtcatcttttcatgcttttttttgtcttggttgtgatgatgtggtctggttgggcggtcgttctagatcggagtagaattctgtttcaaactacctggtggatttattaattttggatctgtatgtgtgtgccatacatattcatagttacgaattgaagatgatggatggaaatatcgatctaggataggtatacatgttgatgcgggttttactgatgcatatacagagatgctttttgttcgcttggttgtgatgatgtggtgtggttgggcggtcgttcattcgttctagatcggagtagaatactgtttcaaactacctggtgtatttattaattttggaactgtatgtgtgtgtcatacatcttcatagttacgagtttaagatggatggaaatatcgatctaggataggtatacatgttgatgtgggttttactgatgcatatacatgatggcatatgcagcatctattcatatgctctaaccttgagtacctatctattataataaacaagtatgttttataattattttgatcttgatatacttggatgatggcatatgcagcagctatatgtggatttttttagccctgccttcatacgctatttatttgcttggtactgtttcttttgtcgatgctcaccctgttgtttggtgttacttctgcagatgcagaaactcattaactcagtgcaaaactatgcctggggcagcaaaacggcgttgactgaactttatggtatggaaaatccgtccagccagccgatggccgagctgtggatgggcgcacatccgaaaagcagttcacgagtgcagaatgccgccggagatatcgtttcactgcgtgatgtgattgagagtgataaatcgactctgctcggagaggccgttgccaaacgctttggcgaactgcctttcctgttcaaagtattatgcgcagcacagccactctccattcaggttcatccaaacaaacacaattctgaaatcggttttgccaaagaaaatgccgcaggtatcccgatggatgccgccgagcgtaactataaagatcctaaccacaagccggagctggtttttgcgctgacgcctttccttgcgatgaacgcgtttcgtgaattttccgagattgtctccctactccagccggtcgcaggtgcacatccggcgattgctcactttttacaacagcctgatgccgaacgtttaagcgaactgttcgccagcctgttgaatatgcagggtgaagaaaaatcccgcgcgctggcgattttaaaatcggccctcgatagccagcagggtgaaccgtggcaaacgattcgtttaatttctgaattttacccggaagacagcggtctgttctccccgctattgctgaatgtggtgaaattgaaccctggcgaagcgatgttcctgttcgctgaaacaccgcacgcttacctgcaaggcgtggcgctggaagtgatggcaaactccgataacgtgctgcgtgcgggtctgacgcctaaatacattgatattccggaactggttgccaatgtgaaattcgaagccaaaccggctaaccagttgttgacccagccggtgaaacaaggtgcagaactggacttcccgattccagtggatgattttgccttctcgctgcatgaccttagtgataaagaaaccaccattagccagcagagtgccgccattttgttctgcgtcgaaggcgatgcaacgttgtggaaaggttctcagcagttacagcttaaaccgggtgaatcagcgtttattgccgccaacgaatcaccggtgactgtcaaaggccacggccgtttagcgcgtgtttacaacaagctgtaagagcttactgaaaaaattaacatctcttgctaagctgggagctctagatccccgaatttccccgatcgttcaaacatttggcaataaagtttcttaagattgaatcctgttgccggtcttgcgatgattatcatataatttctgttgaattacgttaagcatgtaataattaacatgtaatgcatgacgttatttatgagatgggtttttatgattagagtcccgcaattatacatttaatacgcgatagaaaacaaaatatagcgcgcaaactaggataaattatcgcgcgcggtgtcatctatgttactagatcgggaattggcgagctcgaattaattcagtacattaaaaacgtccgcaatgtgttattaagttgtctaagcgtcaatttgtttacaccacaatatatcctggacacgttcaaacactgatagtttaaactgaaggcgggaaacgacaacctgatcatgagcggagaattaagggagtcacgttatgacccccgccgatgacgcgggacaagccgttttacgtttggaactgacagaaccgcaacgttgaaggagccactcagcttaattaagtctaactcgagttactggtacgtaccaaatccatggaatcaaggtaccaaagtaatcatattattttatgtgtgaatcttctttactttttcatttgattatggttatgaaggtatgaccttcataaccttcgtccgaaatccattatatccaaaggaaaataatgcttcgaaggacgaaggattttgatatttaacattttatgttgccttgttcttaattcatagcatttgagaacaagtccccaacaccaatctttatctttactatattaaagcaccagttcaacgatcgtctcgtgtcaatattattaaaaaactcctacatttctttataatcaacccgcactcttataatctcttctcttactactataataagagagtttatgtacaaaataaggtgaaattatgtataagtgttctggaccttggttgttggctcatattcacacaacctaatcaatagaaaacatatgttttattaaaacaaaatttatcatatatatatatatatatatatatatatatatatatatatataatataaaccgtagcaatgcacaggcatatgactagtggcaacttaataccatgtgtgtattaagatgaataagaggtatccaaataaataacttgttcgcttacgtctggatcgaaaggggttggaaacgattaaatctcttcctagtcaaaattaaatagaaggagatttaatcgatttctcccaatccccttcgatccaggtgcaaccgaataagtccttaaatgttgaggaacacgaaacaaccatgcattggcatgtaaagctccaagaattcgttgtatccttaacaactcacagaacatcaaccaaaattgcacgtcaagggtattgggtaagaaacaatcaaacaaatcctctctgtgtgcaaagaaacacggtgagtcatgccgagatcatactcatctgatatacatgcttacagctcacaagacattacaaacaactcatattgcattacaaagatcgtttcatgaaaaataaaataggccggaacaggacaaaaatccttgacgtgtaaagtaaatttacaacaaaaaaaaagccatatgtcaagctaaatctaattcgttttacgtagatcaacaacctgtagaaggcaacaaaactgagccacgcagaagtacagaatgattccagatgaaccatcgacgtgctacgtaaagagagtgacgagtcatatacatttggcaagaaaccatgaagctgcctacagccgtctcggtggcataagaacacaagaaattgtgttaattaatcaaagctataaataacgctcgcatgcctgtgcacttctccatcaccaccactgggtcttcagaccattagctttatctactccagagcgcagaagaacccgatcgacaccggatcctaaaccatgcgcgtgctgctcgtggccctggccctgctggctcttgctgccagcgccacctctgcccagagcgagccggagctgaagctggagagcgtggtgatcgtgagcaggcacggcgtgagggccccgaccaagttcacccagctgatgcaggacgtgaccccggacgcgttctacacctggccggtgaagctgggcgagctgaccccgaggggcggcgagctgatcgcctacctgggccactactggaggcagaggctggtggccgacggcctgctgccgaagaagggctgcccgcagagcggccaggtggccatcatcgccgacgtggacgagaggaccaggaagaccggtgaggccttcgccgccggcctggccccggactgcgccatcaccgtgcacacccaggccgacaccagcagcccggacccgctgttcaacccgctgaagaccggcgtgtgccagctggacgtggcccaggtgaccgacgccatcctggagagggccggcggcagcatcgccgacttcaccggccactaccagaccgccttcagggagctggagagggtgctgaacttcccgcagagcaacctggccctgaagagggagaagcaggacgagagcgccagcctgacccaggccctgccgagcgagctgaaggtgagcgccgacaacgtgagcctgaccggcgcctggagcctggccagcatgctgaccgagattttcctgctgcagcaggcccagggcatgccggagccgggctggggcaggatcaccgacagccaccagtggaacaccctgctgagcctgcacaacgcccagttcgacctgctgcagaggaccccggaggtggccaggagcagggccaccccgctgctggacctgatcaagaccgccctgaccccgcacccgccgcagaagcaggcctacggcgtgaccctgccgaccagcgtgctgttcatcgccggccacgacaccaacctggccaacctgggcggcgccctcgagctgcagtggaccctgccgggccagccggacaacaccccgccgggcggcgagctggtgttcgagaggtggaggaggctgagcgacaacagccagtggattcaggtgagcctggtgttccagaccctgcagcagatgagggacaagaccccgctgttcctgaacaccccgccgggcgaggtgaagctgaccctggccggctgcgaggagaggaacgcccagggcatgtgcagcctggccggcttcacccagatcgtgaacgaggccaggattccggcctgcagcctgagcgagaaggacgagctgtgacctaggtccccgaatttccccgatcgttcaaacatttggcaataaagtttcttaagattgaatcctgttgccggtcttgcgatgattatcatataatttctgttgaattacgttaagcatgtaataattaacatgtaatgcatgacgttatttatgagatgggtttttatgattagagtcccgcaattatacatttaatacgcgatagaaaacaaaatatagcgcgcaaactaggataaattatcgcgcgcggtgtcatctatgttactagatcgggaattgggtaccaaagtaatcatattattttatgtgtgaatcttctttactttttcatttgattatgattatgaaggtatgaccttcataaccttcgtccgaaatccattatatccaaaggaaaataatgcttcgaaggacgaaggattttgatatttaacattttatgttgccttgttcttaattcatagcatttgagaacaagtccccaacaccaatctttatctttactatattaaagcaccagttcaacgatcgtctcgtgtcaatattattaaaaaactcctacatttctttataatcaacccgcactcttataatctcttctcttactactataataagagagtttatgtacaaaataaggtgaaattatgtataagtgttctggaccttggttgttggctcatattcacacaacctaatcaatagaaaacatatgttttattaaaacaaaatttatcatatatatatatatatatatatatatatatatatatatatataatataaaccgtagcaatgcacaggcatatgactagtggcaacttaataccatgtgtgtattaagatgaataagaggtatccaaataaataacttgttcgcttacgtctggatcgaaaggggttggaaacgattaaatctcttcctagtcaaaattaaatagaaggagatttaatcgatttctcccaatccccttcgatccaggtgcaaccgaataagtccttaaatgttgaggaacacgaaacaaccatgcattggcatgtaaagctccaagaattcgttgtatccttaacaactcacagaacatcaaccaaaattgcacgtcaagggtattgggtaagaaacaatcaaacaaatcctctctgtgtgcaaagaaacacggtgagtcatgccgagatcatactcatctgatatacatgcttacagctcacaagacattacaaacaactcatattgcattacaaagatcgtttcatgaaaaataaaataggccggaacaggacaaaaatccttgacgtgtaaagtaaatttacaacaaaaaaaaagccatatgtcaagctaaatctaattcgttttacgtagatcaacaacctgtagaaggcaacaaaactgagccacgcagaagtacagaatgattccagatgaaccatcgacgtgctacgtaaagagagtgacgagtcatatacatttggcaagaaaccatgaagctgcctacagccgtctcggtggcataagaacacaagaaattgtgttaattaatcaaagctataaataacgctcgcatgcctgtgcacttctccatcaccaccactgggtcttcagaccattagctttatctactccagagcgcagaagaacccgatcgacaccggatcctaaaccatgcgcgtgctgctcgtggccctggccctgctggctcttgctgccagcgccacctctgcccagagcgagccggagctgaagctggagagcgtggtgatcgtgagcaggcacggcgtgagggccccgaccaagttcacccagctgatgcaggacgtgaccccggacgcgttctacacctggccggtgaagctgggcgagctgaccccgaggggcggcgagctgatcgcctacctgggccactactggaggcagaggctggtggccgacggcctgctgccgaagaagggctgcccgcagagcggccaggtggccatcatcgccgacgtggacgagaggaccaggaagaccggtgaggccttcgccgccggcctggccccggactgcgccatcaccgtgcacacccaggccgacaccagcagcccggacccgctgttcaacccgctgaagaccggcgtgtgccagctggacgtggcccaggtgaccgacgccatcctggagagggccggcggcagcatcgccgacttcaccggccactaccagaccgccttcagggagctggagagggtgctgaacttcccgcagagcaacctggccctgaagagggagaagcaggacgagagcgccagcctgacccaggccctgccgagcgagctgaaggtgagcgccgacaacgtgagcctgaccggcgcctggagcctggccagcatgctgaccgagattttcctgctgcagcaggcccagggcatgccggagccgggctggggcaggatcaccgacagccaccagtggaacaccctgctgagcctgcacaacgcccagttcgacctgctgcagaggaccccggaggtggccaggagcagggccaccccgctgctggacctgatcaagaccgccctgaccccgcacccgccgcagaagcaggcctacggcgtgaccctgccgaccagcgtgctgttcatcgccggccacgacaccaacctggccaacctgggcggcgccctcgagctgcagtggaccctgccgggccagccggacaacaccccgccgggcggcgagctggtgttcgagaggtggaggaggctgagcgacaacagccagtggattcaggtgagcctggtgttccagaccctgcagcagatgagggacaagaccccgctgttcctgaacaccccgccgggcgaggtgaagctgaccctggccggctgcgaggagaggaacgcccagggcatgtgcagcctggccggcttcacccagatcgtgaacgaggccaggattccggcctgcagcctgagcgagaaggacgagctgtgacctaggtccccgaatttccccgatcgttcaaacatttggcaataaagtttcttaagattgaatcctgttgccggtcttgcgatgattatcatataatttctgttgaattacgttaagcatgtaataattaacatgtaatgcatgacgttatttatgagatgggtttttatgattagagtcccgcaattatacatttaatacgcgatagaaaacaaaatatagcgcgcaaactaggataaattatcgcgcgcggtgtcatctatgttactagatcgggaattggaattcctgcagtgcagcgtgacccggtcgtgcccctctctagagataatgagcattgcatgtctaagttataaaaaattaccacatattttttttgtcacacttgtttgaagtgcagtttatctatctttatacatatatttaaactttactctacgaataatataatctatagtactacaataatatcagtgttttagagaatcatataaatgaacagttagacatggtctaaaggacaattgagtattttgacaacaggactctacagttttatctttttagtgtgcatgtgttctcctttttttttgcaaatagcttcacctatataatacttcatccattttattagtacatccatttagggtttagggttaatggtttttatagactaatttttttagtacatctattttattctattttagcctctaaattaagaaaactaaaactctattttagtttttttatttaataatttagatataaaatagaataaaataaagtgactaaaaattaaacaaataccctttaagaaattaaaaaaactaaggaaacatttttcttgtttcgagtagataatgccagcctgttaaacgccgtcgacgagtctaacggacaccaaccagcgaaccagcagcgtcgcgtcgggccaagcgaagcagacggcacggcatctctgtcgctgcctctggacccctctcgagagttccgctccaccgttggacttgctccgctgtcggcatccagaaattgcgtggcggagcggcagacgtgagccggcacggcaggcggcctcctcctcctctcacggcacggcagctacgggggattcctttcccaccgctccttcgctttcccttcctcgcccgccgtaataaatagacaccccctccacaccctctttccccaacctcgtgttgttcggagcgcacacacacacaaccagatctcccccaaatccacccgtcggcacctccgcttcaaggtacgccgctcgtcctccccccccccccctctctaccttctctagatcggcgttccggtccatggttagggcccggtagttctacttctgttcatgtttgtgttagatccgtgtttgtgttagatccgtgctgctagcgttcgtacacggatgcgacctgtacgtcagacacgttctgattgctaacttgccagtgtttctctttggggaatcctgggatggctctagccgttccgcagacgggatcgatttcatgattttttttgtttcgttgcatagggtttggtttgcccttttcctttatttcaatatatgccgtgcacttgtttgtcgggtcatcttttcatgcttttttttgtcttggttgtgatgatgtggtctggttgggcggtcgttctagatcggagtagaattctgtttcaaactacctggtggatttattaattttggatctgtatgtgtgtgccatacatattcatagttacgaattgaagatgatggatggaaatatcgatctaggataggtatacatgttgatgcgggttttactgatgcatatacagagatgctttttgttcgcttggttgtgatgatgtggtgtggttgggcggtcgttcattcgttctagatcggagtagaatactgtttcaaactacctggtgtatttattaattttggaactgtatgtgtgtgtcatacatcttcatagttacgagtttaagatggatggaaatatcgatctaggataggtatacatgttgatgtgggttttactgatgcatatacatgatggcatatgcagcatctattcatatgctctaaccttgagtacctatctattataataaacaagtatgttttataattattttgatcttgatatacttggatgatggcatatgcagcagctatatgtggatttttttagccctgccttcatacgctatttatttgcttggtactgtttcttttgtcgatgctcaccctgttgtttggtgttacttctgcagatgcagaaactcattaactcagtgcaaaactatgcctggggcagcaaaacggcgttgactgaactttatggtatggaaaatccgtccagccagccgatggccgagctgtggatgggcgcacatccgaaaagcagttcacgagtgcagaatgccgccggagatatcgtttcactgcgtgatgtgattgagagtgataaatcgactctgctcggagaggccgttgccaaacgctttggcgaactgcctttcctgttcaaagtattatgcgcagcacagccactctccattcaggttcatccaaacaaacacaattctgaaatcggttttgccaaagaaaatgccgcaggtatcccgatggatgccgccgagcgtaactataaagatcctaaccacaagccggagctggtttttgcgctgacgcctttccttgcgatgaacgcgtttcgtgaattttccgagattgtctccctactccagccggtcgcaggtgcacatccggcgattgctcactttttacaacagcctgatgccgaacgtttaagcgaactgttcgccagcctgttgaatatgcagggtgaagaaaaatcccgcgcgctggcgattttaaaatcggccctcgatagccagcagggtgaaccgtggcaaacgattcgtttaatttctgaattttacccggaagacagcggtctgttctccccgctattgctgaatgtggtgaaattgaaccctggcgaagcgatgttcctgttcgctgaaacaccgcacgcttacctgcaaggcgtggcgctggaagtgatggcaaactccgataacgtgctgcgtgcgggtctgacgcctaaatacattgatattccggaactggttgccaatgtgaaattcgaagccaaaccggctaaccagttgttgacccagccggtgaaacaaggtgcagaactggacttcccgattccagtggatgattttgccttctcgctgcatgaccttagtgataaagaaaccaccattagccagcagagtgccgccattttgttctgcgtcgaaggcgatgcaacgttgtggaaaggttctcagcagttacagcttaaaccgggtgaatcagcgtttattgccgccaacgaatcaccggtgactgtcaaaggccacggccgtttagcgcgtgtttacaacaagctgtaagagcttactgaaaaaattaacatctcttgctaagctgggagctctagatccccgaatttccccgatcgttcaaacatttggcaataaagtttcttaagattgaatcctgttgccggtcttgcgatgattatcatataatttctgttgaattacgttaagcatgtaataattaacatgtaatgcatgacgttatttatgagatgggtttttatgattagagtcccgcaattatacatttaatacgcgatagaaaacaaaatatagcgcgcaaactaggataaattatcgcgcgcggtgtcatctatgttactagatcgggaattggcgagctcgaattaattcagtacattaaaaacgtccgcaatgtgttattaagttgtctaagcgtcaatttgtttacaccacaatatatccctacccacaactcatggtacaaaattaccaacctaacctcacccataaatgatgctcttcaatagggttggcattcggttttttgaaacttcggttcggttctttggttttaaaaaacttcggggtttcaaatattagaagccgatcggttttctagaaaatgaaaaaccgataagttcggtttcggttttttactttggttttttcggtaaaaaccgaataccaaacttatactcaagaaggctacaaggcaacacattacgcacaattttaaaaagtaaaaattatataggtacaaatatttaaatatatatcatacatcacatacaaacaagtgaataacaatttgattgcatcacacatttagttcacataatcaaagagtcgatttgtttaattgataatgtttggtattcggtttttttgtatttcggttcggtatacggtgaaaaccgattacgataccgaataccaaaattctcagatgtaaaaaccgaatccgaactaccaaaaaaccgaaatttcggttcggttcggttcggtacgcttcagttttcggtttacggtaaaaaagtgcccaccctactcttcaatccaccccaacggcccaacctgccccaccattgcgggtatgctatgggttgtgtttcatagtctgctcctagcaggcagccgcagacagtgagcacttaggagggagctgcgatgtcgagccgccggttgatctccttgtccgtgagaggtgaagtgggcacagtagatgcagaaagccttgcaccatcctgggttcacggggtcactagtgatgactccgtgtctgccgcacaagagcctgacccagcgagtgcttgaaacccctccacgaactgcagaaatgttgaatccgaataaagcaaagcaagaagctactactgacatttttatgaagaaaatataagtcattcttggactgatttacaccgtggaagatcccaggccgccacctagggttagtgaggtggttggcctccaggatggtggcgtccagagtgcggtgcagcagcagatgcgtcatggatgcacgcctgtacctccacttcctccttagatcacttgtgcaagacaacttcacctgggagatagaggcctatcagctttcatcaaaagtgcatagcgtggcaagagataaaggatgactaattttggatatgattcagagctagagaatttgggaagaaattaagagagggaattagtacaagatagaccagaaacatggagcactgcattgccaagtgccaacgaactgcagagtgtgctccaatcctagcaagaaaaggaaagggcagcgagaaagggaagggtaaaagaatgatgcaaaggagcagatgaggggcaagacgcgcctagatctaacgtctaggcatggaagcggcggtagaggtagggtggcgtcacccctatggccgcggaaggcccgagcgaggcaatcgggaagatgactcaaatcaacccgctccatcccaacccaaacccgcctatgtagaaaacccgccccgccctagctaccaaaacccatttccacccatccaaataaactctatatcaaaaccaaacccataaaacctattctaaggttgtctctagcagatcatgtataatgtcgtgcaaaacactattttgcactgcatacatcactattcacggagtggagtttgaaataggaggtgagaggtcgtctctagcaagttacccatcctctctcctatctcatcttctatttcaaactttactttgtgaacagtgcaaaacagtgtttttgtgtgaccatatgcatgatttgttggagatagcctaaggctatggccaacagaccgtacatatggtcgtacaaaacattgttttgcactgtttacagagtaaagtttgaaataagggataggatgagtaacaatgctggatatatagcataacccaccccattagcaggcctggacaagtatcatgtgttcagtgtttacttcattacttgtagagatagtgtgtgccatctgatgtactccctcaattctttgctatttgtcgcgttttagttcaaaaatgtactaacgggcgacaaatattcgagaacggagttagtattaatttgcattcatgcagcgatataattaagagttgcaatttcttttgttgaacttaaaccttgatttgcctacactcagaatttgcagtataagttattagtaactctcttgcatatgcaggaccagccgggtgctttcagcagaacaagttcaatgaaggaaggatcctctgagttaccgagtggtgtccgaagctcagcagaaccaagccccaggagatctggcggttcaaccctttttggagggcttggttttctaaggagctacaccagctgagacgtatgtgctcagatacgtgaatttttattcagactccatcagcttgagctgcatatgtaggtagtagaaaacatggcagttgccaaaaggatggctcccttttccaattgggaattgcgaatttttgtaggaacttaataccttgcagggcaatgcctggagggttgtatattgcactggattatactagtagaatacatgtttggcaaggagcagttgcaactaaatttgtgcttttcttggactcaaacctgctggctgatgatgcttgcttggatagcatgtatgcaacatttgttgtggcagctgcaggctgcaggcatatctggaaactctggatccactcacggttggatttccacccagtacttggtctgatatgtgatatggacaagacgttatgatccgcaacgtccatgcataaaaatcaattgtgtgtttggttcagctttctaaattcgatttgctgccaaaaatcagtaatctaaatctcaactaaatgggtgcaacaaaataatagatttctgaatgaccgatgccattcattttgtagattcctatcatacatgtttaccaagctatcagcaaaccgttagtttaggaatctgctttcgaacagacctgagcttgttgtctcaacctcattgttctacacttacctataacaatgctttttaagaccatatttttgcaatactgtaatttacaattattacatcctaataactttctcataactagaatcaaatttcagtaacccacattcgaacagacccgagcttgctgtactcaacatcattgttctacacttacatataacaattctttttaaaaccatatttttataataatgtagtttgcaattattgtcacagtcatagttttagttggcttcaaaaataaatacaatggtttagatataatattgtagaccattgtatttagatgttataaaaactttatgctaaatagcacaatcttcatctctactatattaaagcaccagtttcaacggtctttccacatcatccttccctcttaatgcaaaaataaaataaaattatgtataaatgatggtttgaaaaccttagttgttggctcaaccaatagaacgggcaatgttttgtgtcataataaaacgaagtctactcatatgatatatagaaatcgtgacaaagtacggacaactaactattagtttgaaaacacagttttaaaaaatgcaaccgaacctcttattgattgtataaaatactatagtaaaccataaaatttctctataaactataaaaaatattttacttctaaatagatctttgttgcatatttttaaaggtaaatcctttatttcttgcctcaagttaggtgtagtatcaataattaaacatcatagcatatgttgtagcctcagatcagctgtagcatgaataagtaagcataatcatcgcatatgtccaattatcaattgtgatgtatatttcagtaatgataaaataagacaacataaggtatagagtttaattggttgtctggacctggagaagtcctaaaaggaagaagaaaaaaaagcaaagagtgaaatcatttgttgcaagcaaatcagaggaaaaataagatcatcaccggccctttttcgattcctcacaataagtttggtaaaagagaacaactcggttcttagcctaactagtcaacattaatgttttttgggcttgatgatgcttctttcttggggctttattaaacggggtatcatgtatattttggcgagatgattttaaataaaaaacatataacggctcgtttggatccttagaatt

SEQ ID NO: 176 - DNA, 112 bp, Artificial Sequence
  Synthetic construct, PY209 (513+889)
aaacgtccgcaatgtgttattaagttgtctaagcgtcaatttgtttacctcatgtagaaaagcatatatgcaccttctgacataacttgattcactgatacaacctggacct

SEQ ID NO: 177 - DNA, 179 bp, Artificial Sequence
  Synthetic construct, PY1053 loc1(513+887)
cgctcgaattgttgcatgttgagaagtacccatatatagcggctagctgcagctagtctcttgctaaaaatcagctgtaaagtcattcgaggatagaaaacaaaagagccatgaaaaggatatattgtggtgtaaacaaattgacgcttagacaacttaataacacattgcggacgttt

SEQ ID NO: 178 - DNA, 227 bp, Artificial Sequence
  Synthetic construct, PY1053 loc2 (513+886)
aaacgtccgcaatgtgttattaagttgtctaagcgtcaatttgtttacaccacaaaagagctagagtggatgggtgggggggacaaatgaaaacaagcgtacgacatcaccagcaccagcaacaataacttaaccacaacacaacaacgacgcccgattattaaacgcggtacaagcgagggcataaaagaaaaaagagggatccccaaaggaggaatggagaggga

SEQ ID NO: 179 - DNA, 228 bp, Artificial Sequence
  Synthetic construct, PY1203 loc1 (855+890)
atgattagagtcccgcaattatacatttaatacgcgatagaaaacaaaatatagcgcgcaaactaggataaattatcgcgcgcggtgtcatctatgttactagatcgggaattggcgagctcgaattaattcagtacattaaaaacgtccgcaatgtgttattaagttgtctaagcgtcaatttgttgtttcaaccctcatagtcatagaagccacctatcttgacca

SEQ ID NO: 180 - DNA, 182 bp, Artificial Sequence
  Synthetic construct, PY1203 loc2 (855+908)
atactaaaaaggcacgaccgtcaaagccgctagattcgtcaacatgtactgaattaattcgagctcgccaattcccgatctagtaacatagatgacaccgcgcgcgataatttatcctagtttgcgcgctatattttgttttctatcgcgtattaaatgtataattgcgggactctaatcat

SEQ ID NO: 181 - DNA, 6189 bp, Artificial Sequence
  Synthetic construct, pAG4295
tacagggttccttgcgtgaagaagggtggcctgcggttcaccattaacggtcacgactacttccagctagtactggtgaccaacgtcgcggcggcagggtcaatcaagtccatggaggttatgggttccaacacagcggattggatgccgatggcacgtaactggggcgcccaatggcactcactggcctacctcaccggtcaaggtctatcctttagggtcaccaacacagatgaccaaacgctcgtcttcaccaacgtcgtgccaccaggatggaagtttggccagacatttgcaagcaagctgcagttcaagtgagaggagaagcctgaattgataccggagcgtttcttttgggagtaacatctctggttgcctagcaaacatatgattgtatataagtttcgttgtgcgtttattctttcggtgtgtaaaataacatacatgctttcctgatattttcttgtatatatgtacacacacacgacaaatccttccatttctattattattgaacaatttaattgcgagggcgagtacttgtctgtttaccttttttttttcagatggcattttatagtttaacctttcatggaccggcagtagttctaaccatgaatgaaaagaaatcatagtccacaccacgcagggacattgtggtcattttagacaagacgatttgattaatgtcttgtatgatatggtcgacagtgaggactaacaaacatatggcatattttattaccggcgagttaaataaatttatgtcacagtaataaactgcctaataaatgcacgccagaaaatataatgataaaaaaaagaaaagatacataagtccattgcttctacttttttaaaaattaaatccaacattttctattttttggtataaacttggaagtactagttggatatgcaaaatcatctaacctccatatatttcatcaatttgtttactttacatatgggagaggatagtatgtcaaagaaaatgacaacaagcttacaagtttcttattttaaaagttccgctaacttatcaagcatagtgtgccacgcaaaactgacaacaaaccaacaaatttaaggagcgcctaacttatcatctatgacataccgcacaaaatgataacatactagagaaactttattgcacaaaaggaaatttatccataaggcaaaggaacatcttaaggctttggatatacatttaccaacaagcattgtttgtattacccctaaagcgcaagacatgtcatccatgagtcatagtgtgtatatctcaacattgcaaagctaccttttttctattatacttttcgcattataggctagatattatctatacatgtcaacaaactctatccctacgtcatatctgaagattcttttcttcactatataagttggcttccctgtcattgaactcacatcaaccagcccaagtttccaataacatcctcaaatagctggatccaccatgagggtgttgctcgttgccctcgctctcctggctctcgctgcgagcgccaccagcgctgcgcagtccgagccggagctgaagctggagtccgtggtgatcgtgtcgcgccacggggtgcgcgccccgaccaagttcacgcagctcatgcaggacgtgaccccggacgccttctacacctggccggtgaagctcggcgagctgaccccgcgcggcggcgagctgatcgcctacctcggccactactggcgccagcgcctcgtggccgacggcctcctcccgaagaagggctgcccgcagtccggccaggtggcgatcatcgccgacgtggacgagcgcacccgcaagacgggcgaggccttcgccgccggcctcgccccggactgcgccatcaccgtgcacacccaggccgacacctcctccccggacccgctcttcaacccgctcaagaccggcgtgtgccagctcgacgtggcccaggtgaccgacgccatcctggagcgcgccggcggctccatcgccgacttcaccggccactaccagaccgccttccgcgagctggagcgcgtgctcaacttcccgcagtcgaacctcgccctcaagcgcgagaagcaggacgagtccgcctccctcacccaggccctcccgtccgagctgaaggtgtccgccgacaacgtgtccctcaccggcgcctggtccctcgcctccatgctcaccgaaatcttcctcctccagcaggcccagggcatgccggagccgggctggggccgcatcaccgactcccaccagtggaacaccctcctctccctccacaacgcccagttcgacctcctccagcgcaccccggaggtggcccgctcccgcgccaccccgctcctcgacctcatcaagaccgccctcaccccgcacccgccgcagaagcaggcctacggcgtgaccctcccgacctcggtgctcttcatcgccggccacgacaccaacctcgccaacctcggcggcgccctggagctgcagtggaccctcccgggccagccggacaacaccccgccgggcggcgagctggtgttcgagcgctggcgccgcctctccgacaactcccagtggattcaggtgtccctcgtgttccagaccctccagcagatgcgcgacaagaccccgctcttcctcaacaccccgccgggcgaggtgaagctcaccctggccggctgcgaggagcgcaacgcgcagggcatgtgctccctcgccggcttcacccagatcgtgaacgaggcccgcatcccggcctgctccctctccgagaaggacgagctgtaacctaggtccccgaatttccccgatcgttcaaacatttggcaataaagtttcttaagattgaatcctgttgccggtcttgcgatgattatcatataatttctgttgaattacgttaagcatgtaataattaacatgtaatgcatgacgttatttatgagatgggtttttatgattagagtcccgcaattatacatttaatacgcgatagaaaacaaaatatagcgcgcaaactaggataaattatcgcgcgcggtgtcatctatgttactagatcgggaattgttaattaagtctaactcgagttactggtacgtatacagggttccttgcgtgaagaagggtggcctgcggttcaccattaacggtcacgactacttccagctagtactggtgaccaacgtcgcggcggcagggtcaatcaagtccatggaggttatgggttccaacacagcggattggatgccgatggcacgtaactggggcgcccaatggcactcactggcctacctcaccggtcaaggtctatcctttagggtcaccaacacagatgaccaaacgctcgtcttcaccaacgtcgtgccaccaggatggaagtttggccagacatttgcaagcaagctgcagttcaagtgagaggagaagcctgaattgataccggagcgtttcttttgggagtaacatctctggttgcctagcaaacatatgattgtatataagtttcgttgtgcgtttattctttcggtgtgtaaaataacatacatgctttcctgatattttcttgtatatatgtacacacacacgacaaatccttccatttctattattattgaacaatttaattgcgagggcgagtacttgtctgtttaccttttttttttcagatggcattttatagtttaacctttcatggaccggcagtagttctaaccatgaatgaaaagaaatcatagtccacaccacgcagggacattgtggtcattttagacaagacgatttgattaatgtcttgtatgatatggtcgacagtgaggactaacaaacatatggcatattttattaccggcgagttaaataaatttatgtcacagtaataaactgcctaataaatgcacgccagaaaatataatgataaaaaaaagaaaagatacataagtccattgcttctacttttttaaaaattaaatccaacattttctattttttggtataaacttggaagtactagttggatatgcaaaatcatctaacctccatatatttcatcaatttgtttactttacatatgggagaggatagtatgtcaaagaaaatgacaacaagcttacaagtttcttattttaaaagttccgctaacttatcaagcatagtgtgccacgcaaaactgacaacaaaccaacaaatttaaggagcgcctaacttatcatctatgacataccgcacaaaatgataacatactagagaaactttattgcacaaaaggaaatttatccataaggcaaaggaacatcttaaggctttggatatacatttaccaacaagcattgtttgtattacccctaaagcgcaagacatgtcatccatgagtcatagtgtgtatatctcaacattgcaaagctaccttttttctattatacttttcgcattataggctagatattatctatacatgtcaacaaactctatccctacgtcatatctgaagattcttttcttcactatataagttggcttccctgtcattgaactcacatcaaccagcccaagtttccaataacatcctcaaatagctggatccaccatgagggtgttgctcgttgccctcgctctcctggctctcgctgcgagcgccaccagcgctgcgcagtccgagccggagctgaagctggagtccgtggtgatcgtgtcgcgccacggggtgcgcgccccgaccaagttcacgcagctcatgcaggacgtgaccccggacgccttctacacctggccggtgaagctcggcgagctgaccccgcgcggcggcgagctgatcgcctacctcggccactactggcgccagcgcctcgtggccgacggcctcctcccgaagaagggctgcccgcagtccggccaggtggcgatcatcgccgacgtggacgagcgcacccgcaagacgggcgaggccttcgccgccggcctcgccccggactgcgccatcaccgtgcacacccaggccgacacctcctccccggacccgctcttcaacccgctcaagaccggcgtgtgccagctcgacgtggcccaggtgaccgacgccatcctggagcgcgccggcggctccatcgccgacttcaccggccactaccagaccgccttccgcgagctggagcgcgtgctcaacttcccgcagtcgaacctcgccctcaagcgcgagaagcaggacgagtccgcctccctcacccaggccctcccgtccgagctgaaggtgtccgccgacaacgtgtccctcaccggcgcctggtccctcgcctccatgctcaccgaaatcttcctcctccagcaggcccagggcatgccggagccgggctggggccgcatcaccgactcccaccagtggaacaccctcctctccctccacaacgcccagttcgacctcctccagcgcaccccggaggtggcccgctcccgcgccaccccgctcctcgacctcatcaagaccgccctcaccccgcacccgccgcagaagcaggcctacggcgtgaccctcccgacctcggtgctcttcatcgccggccacgacaccaacctcgccaacctcggcggcgccctggagctgcagtggaccctcccgggccagccggacaacaccccgccgggcggcgagctggtgttcgagcgctggcgccgcctctccgacaactcccagtggattcaggtgtccctcgtgttccagaccctccagcagatgcgcgacaagaccccgctcttcctcaacaccccgccgggcgaggtgaagctcaccctggccggctgcgaggagcgcaacgcgcagggcatgtgctccctcgccggcttcacccagatcgtgaacgaggcccgcatcccggcctgctccctctccgagaaggacgagctgtaacctaggtccccgaatttccccgatcgttcaaacatttggcaataaagtttcttaagattgaatcctgttgccggtcttgcgatgattatcatataatttctgttgaattacgttaagcatgtaataattaacatgtaatgcatgacgttatttatgagatgggtttttatgattagagtcccgcaattatacatttaatacgcgatagaaaacaaaatatagcgcgcaaactaggataaattatcgcgcgcggtgtcatctatgttactagatcgggaat

SEQ ID NO: 182 - DNA, 138 bp, Artificial Sequence
  Synthetic construct, PY209Loc2 (456+889)
gagctcgaattaattcagtacattaaaaacgtccgcaatgtgttattaagttgtctaagcgtcaatttgtttacctcatgtagaaaagcatatatgcaccttctgacataacttgattcactgatacaacctggacct

SEQ ID NO: 183 - DNA, 159 bp, Artificial Sequence
  Synthetic construct, PY1053 T-DNA loc (505+925)
tgttactagatcgggaattggcgagctcgaattaattcagtacattaaaaacgtccgcaatgtgttattaagttgtctaagcgtcaatttgtttacaccacaaaagagctagagtggatgggtgggggggacaaatgaaaacaagcgtacgacatcacc

SEQ ID NO: 184 - DNA, 112 bp, Artificial Sequence
  Synthetic construct, PY1203 T-DNA locus (456+890)
gagctcgaattaattcagtacattaaaaacgtccgcaatgtgttattaagttgtctaagcgtcaatttgttgtttcaaccctcatagtcatagaagccacctatcttgacca
